United States Patent Application Publication US 2011/0321197 A1 - sequence listing, part 4

SEQ ID NO: 8704 - protein, 236 aa, Ricinus communis
MAFARLALRSLSQRVSSSASSLVGHGVIERSVGDGVQSQRWNRELLKRFMATASGEASDGKEVAVSERDNKKSKLFSKKKGKRGLWRRNGGEFVPQLYEFFPSGLGNALLQATENINRLFENLNLSPSNLMRRLKEKEECYKLRYEVPGVTKEDLKITVDDGVLTIKGEHKEEEEEEGSDDEHWSMRSYGYYNTSVLLPDDAKADEIKAELKNGVLHITIPRTEQPKKDVKEVQIH

SEQ ID NO: 8705 - DNA, 732 bp, Funaria hygrometrica
  CDS (1)..(732)
atggccgctcgcacactctctcgtgtggtcgccagtccagccaggtcttttctgagtacgttcagagatactttcttaatgcaaggacgttcgccactgccacgccaagcgccattttcagtcgcccagcggatggccgtctctggcagcgcacaaactgtctccgatgatgactacgaatcacgaagtcagttggagaaaatgcagaatgagagcaatgcgtcacagaagagaagtcaaggcggtcttagacgagttgtaccaagggatttggcggcttcctttttcgatgtctgggatcctttcctgggcaacaaaagcttgaggcagatgttaaatacagttgaccgtctctttgatgatcccttcttcagcgcagcaccttctcgacccactggcatcgcccttgactttcgcacaccttgggacgtgaaagaagacaacgagtcttttagacttcgattcgacatgccaggtcttgggaaagatgaggtgaaagtttatgtcgaagatggtgacttggtgatcaagggcgcgcacagagcagaggaacagaaggagaataattggtcctctcgcagttatggtagctacaatacccgcatgaccttgcccgaaaatgttaagattgacgaagtgaaggcggagctgaagaacggtgttctacaggtcgttgtacccaaatccaaggaagagcccaagaaaaatgtcatcgacatcaatgttgagtga

SEQ ID NO: 8706 - protein, 243 aa, Funaria hygrometrica
MAARTLSRVVASPARSFLSTFRDTFLMQGRSPLPRQAPFSVAQRMAVSGSAQTVSDDDYESRSQLEKMQNESNASQKRSQGGLRRVVPRDLAASFFDVWDPFLGNKSLRQMLNTVDRLFDDPFFSAAPSRPTGIALDFRTPWDVKEDNESFRLRFDMPGLGKDEVKVYVEDGDLVIKGAHRAEEQKENNWSSRSYGSYNTRMTLPENVKIDEVKAELKNGVLQVVVPKSKEEPKKNVIDINVE

SEQ ID NO: 8707 - DNA, 717 bp, Funaria hygrometrica
  CDS (1)..(717)
atggcttcaagcacggctaagtccggatttcatacattcatggaggcgctcacgggggctggtcgcgagccagtgactgctgtgtcatgccgaccaccatgttatggttttcgaaggttggctgtcgttagtagttctcaacaagagaatgcttctgagaattcagataggtcgctgacacagttgccgagacaagacggaggatcaagatcacctggtcctaggagaccgatgggtttaagaagaggcgatactcgaagagatttgacttcttcattgtttgatatctgggatccgtttattggtgacaggagcttgaagcagatgctgaacaccgtggatcgtctctttgcggatcctttcttcggtagccctccctcagccactgcattggacctccgcacaccctgggatgtgaaagaggatgctgatgcttacaaacttcggtttgacatgccaggccttagtaaggaagaggtgaaagtttcagtggaagatggtgatcttgtaatcaggggagagcacaatgcagaagatcaaaaggaagatagttggtcttcccgcagctatgggagttataatacacggatggctttacctgaggacgctttgttcgaggatattaaagcggagctcaagaatggggttctgtatgttgtcgtgcccaagtccaagaaagatgcccagaaaaaagttcttgacatcaatgtgcagtaa

SEQ ID NO: 8708 - protein, 238 aa, Funaria hygrometrica
MASSTAKSGFHTFMEALTGAGREPVTAVSCRPPCYGFRRLAVVSSSQQENASENSDRSLTQLPRQDGGSRSPGPRRPMGLRRGDTRRDLTSSLFDIWDPFIGDRSLKQMLNTVDRLFADPFFGSPPSATALDLRTPWDVKEDADAYKLRFDMPGLSKEEVKVSVEDGDLVIRGEHNAEDQKEDSWSSRSYGSYNTRMALPEDALFEDIKAELKNGVLYVVVPKSKKDAQKKVLDINVQ

SEQ ID NO: 8709 - DNA, 699 bp, Brassica napus
  CDS (1)..(699)
atggctttggctcgtttggctttgagaaaccttcaacaaaagttgtcttctaccttcatgtgtccaagtggtgaaaaatgtttggtcgggaaccgacatagccagagtaaacttaatagattcatggctagttcgagtggcgaacaagaggaaaagaagagtacagaagtcagtgtgtctgagaagaagtcccctaaacggattttccccaggagacgtggtcggaaaagtttatggcgtaacaccgacgatcatgactattttgcacccgcactaaatgggttctttcctccgagtctaggaaatgctctaatgcaagcaacggagaacataaacaggatcttctataatttcgacattagaccatctcaactaatgggtcaagtgaaggagcaagacgactgttacaagctgaggtacgaggttccagggctaaccaaagatgacgtgaagatcacggtagataatggaatcctgatgattaaaggagaacacaagggcgaggaagaagaaggatcacctgaagaagacgagcactggtcttcaaggagttatggttactacaacacgagcttgtctctgcctgatgatgctaaggttgaggaaatcaaggcggaactcaagaacggtgtgcttaatgttgtgattcctaggatggagaagccaaagaaggatgttcaggagattactgttgagtag

SEQ ID NO: 8710 - protein, 232 aa, Brassica napus
MALARLALRNLQQKLSSTFMCPSGEKCLVGNRHSQSKLNRFMASSSGEQEEKKSTEVSVSEKKSPKRIFPRRRGRKSLWRNTDDHDYFAPALNGFFPPSLGNALMQATENINRIFYNFDIRPSQLMGQVKEQDDCYKLRYEVPGLTKDDVKITVDNGILMIKGEHKGEEEEGSPEEDEHWSSRSYGYYNTSLSLPDDAKVEEIKAELKNGVLNVVIPRMEKPKKDVQEITVE

SEQ ID NO: 8711 - DNA, 678 bp, Glycine max
  CDS (1)..(678)
atggctttggcacgtttggctttgaaaaacttgcaacaaagggtgtgtgcttcctctttcttgagtggcaatgttcacaagcagaggtggaacaatgagttgctgagaaggtttggtactgcagctggggacaagggaaaatctgaaggcactgaagttgctgtcactgaagggaaaaagtctaataggatgttcccaaggaggaggggcagaagatgggcttggagaaatgaggatcatgatgacttccctcctgctctttatgagttgtttccttcagggcttgggagtgcactgatgcaggcaagtaataacatcaacaggctgtttgagaacatgaatctgacaccttggtctctgactagtgggcgtgtgaaagagaaggatgaccattacaaactacggtacgagatgccggggatcgccaaagaggacgtgaagatcaccattgatgatgatggggtgttgacaataaagggagagcacaaggaagagaaagatgatgatgagcaatattggtcatcaagtagctatggatactataacacaagcctgattttgcctgatgatgctaaagctgatgacattaaggcagagttgaaggatggtgtcctaactctaatcaagcctaagactcagaacccccaaaaggatgtgaaacaagtcacaatagaatga

SEQ ID NO: 8712 - protein, 225 aa, Glycine max
MALARLALKNLQQRVCASSFLSGNVHKQRWNNELLRRFGTAAGDKGKSEGTEVAVTEGKKSNRMFPRRRGRRWAWRNEDHDDFPPALYELFPSGLGSALMQASNNINRLFENMNLTPWSLTSGRVKEKDDHYKLRYEMPGIAKEDVKITIDDDGVLTIKGEHKEEKDDDEQYWSSSSYGYYNTSLILPDDAKADDIKAELKDGVLTLIKPKTQNPQKDVKQVTIE

SEQ ID NO: 8713 - DNA, 723 bp, Zea mays
  CDS (1)..(723)
atggcagctgctccgttcgcgattgccggccgcctctcccccgttgtgcgcctcccggtccgcgcctggaggccggcgcacgggtttgcgtcgtccgggagagcccgctcgctcgccgtggcgtccgcggcgcaggagaacagggacaacagtgtcgacgtacaggttagccagaacggcagcaacaggcagcagggcaacgccgtgcagcgccgcccgcgccgcgcgacagcgctcgacatctccccatccccgttcgggttagttgatccgatgtcgccgatgcggacgatgcggcagatgctggacacgatggacaggctgttcgacgacgccgtggggttccccatggggacacggaggtccccggcgaccaccggcgacgtacgcctgccgtgggacatcgtggaggacgagaaggaggtgaagatgcggatcgacatgccgggcctcgcgcgcgacgaggtgaaggtgatggtggaggacgacacgctggtcatccgaggggagcacaagaaggaggagggcgcggagggcggcagcggcggcgacggcgacgggtggtggaagcagcgcagcgtgagctcctacgacatgcggctggcgctgccggatgagtgcgacaagagcaaggtgcgcgccgagctcaagaacggcgtgctcctcgtcaccgtgcccaagaccgaggtggagcgcaaggtcatcgacgtgcaggtccagtag

SEQ ID NO: 8714 - protein, 240 aa, Zea mays
MAAAPFAIAGRLSPVVRLPVRAWRPAHGFASSGRARSLAVASAAQENRDNSVDVQVSQNGSNRQQGNAVQRRPRRATALDISPSPFGLVDPMSPMRTMRQMLDTMDRLFDDAVGFPMGTRRSPATTGDVRLPWDIVEDEKEVKMRIDMPGLARDEVKVMVEDDTLVIRGEHKKEEGAEGGSGGDGDGWWKQRSVSSYDMRLALPDECDKSKVRAELKNGVLLVTVPKTEVERKVIDVQVQ

SEQ ID NO: 8715 - DNA, 20 bp, Artificial sequence
  primer
atggctctagctcgtctggc

SEQ ID NO: 8716 - DNA, 21 bp, Artificial sequence
  primer
ctactcaacagaaatctcctg

SEQ ID NO: 8717 - protein, 262 aa, Artificial sequence
  consensus sequence
  Variant (2)..(57): Xaa in position 2 to 57 is any amino acid
  Variant (58)..(80): Xaa in position 58 to 80 is any or no amino acid
  Variant (82)..(105): Xaa in position 82 to 105 is any amino acid
  Variant (106)..(114): Xaa in position 106 to 114 is any or no amino acid
  Variant (116)..(131): Xaa in position 116 to 131 is any amino acid
  Variant (132)..(148): Xaa in position 132 to 148 is any or no amino acid
  Variant (150)..(155): Xaa in position 150 to 155 is any amino acid
  Variant (158)..(160): Xaa in position 158 to 160 is any amino acid
  Variant (163)..(164): Xaa in position 163 to 164 is any amino acid
  Variant (166)..(167): Xaa in position 166 to 167 is any amino acid
  Variant (170)..(171): Xaa in position 170 to 171 is any amino acid
  Variant (173)..(173): Xaa in position 173 is any amino acid
  Variant (175)..(176): Xaa in position 175 to 176 is any amino acid
  Variant (177)..(177): Xaa in position 177 is any or no amino acid
  Variant (179)..(179): Xaa in position 179 is any amino acid
  Variant (181)..(181): Xaa in position 181 is any amino acid
  Variant (184)..(186): Xaa in position 184 to 186 is any amino acid
  Variant (187)..(188): Xaa in position 187 to 188 is any or no amino acid
  Variant (190)..(192): Xaa in position 190 to 192 is any amino acid
  Variant (193)..(213): Xaa in position 193 to 213 is any or no amino acid
  Variant (215)..(216): Xaa in position 215 to 216 is any amino acid
  Variant (217)..(217): Xaa in position 217 is any or no amino acid
  Variant (219)..(219): Xaa in position 219 is any amino acid
  Variant (220)..(221): Xaa in position 220 to 221 is any or no amino acid
  Variant (223)..(227): Xaa in position 223 to 227 is any amino acid
  Variant (230)..(238): Xaa in position 230 to 238 is any amino acid
  Variant (239)..(239): Xaa in position 239 is any or no amino acid
  Variant (242)..(242): Xaa in position 242 is any amino acid
  Variant (244)..(244): Xaa in position 244 is any amino acid
  Variant (248)..(251): Xaa in position 248 to 251 is any amino acid
  Variant (253)..(259): Xaa in position 253 to 259 is any amino acid
  Variant (260)..(261): Xaa in position 260 to 261 is any or no amino acid
AXXXXXXXXXXXXXXXXXXXXXXXXXXXXXXXXXXXXXXXXXXXXXXXXXXXXXXXXXXXXXXXXXXXXXXXXXXXXXXXRXXXXXXXXXXXXXXXXXXXXXXXXXXXXXXXXXLXXXXXXXXXXXXXXXXXXXXXXXXXXXXXXXXXEXXXXXXLRXXXPGXXKXXVKXXVXDXXXLXIXGEXXXXXEXXXXXXXXXXXXXXXXXXXXXXXXWXXXSXXXYXXXXXLPXXXXXXXXXXAEXKXGVLXXXXPXXXXXXXXXV

SEQ ID NO: 8718 - protein, 25 aa, Artificial sequence
  protein pattern
  Variant (2)..(2): Xaa in position 2 is any amino acid
  Variant (3)..(3): Xaa in position 3 is Asp or Glu
  Variant (4)..(4): Xaa in position 4 is Met or Val
  Variant (7)..(7): Xaa in position 7 is Leu or Val
  Variant (8)..(8): Xaa in position 8 is Ala, Gly, Ser or Thr
  Variant (9)..(9): Xaa in position 9 is Lys or Arg
  Variant (10)..(10): Xaa in position 10 is Asp, Glu or Gly
  Variant (11)..(11): Xaa in position 11 is Asp or Glu
  Variant (12)..(12): Xaa in position 12 is Leu or Val
  Variant (13)..(13): Xaa in position 13 is Lys or Arg
  Variant (14)..(14): Xaa in position 14 is Ile or Val
  Variant (15)..(15): Xaa in position 15 is any amino acid
  Variant (16)..(16): Xaa in position 16 is Ile or Val
  Variant (17)..(17): Xaa in position 17 is Asp, Glu or Asn
  Variant (18)..(18): Xaa in position 18 is Asp, Asn or Gln
  Variant (19)..(19): Xaa in position 19 is Asp, Gly or Asn
  Variant (20)..(20): Xaa in position 20 is any amino acid
  Variant (22)..(22): Xaa in position 22 is any amino acid
  Variant (24)..(24): Xaa in position 24 is Glu, His, Lys or Arg
RXXXPGXXXXXXXXXXXXXXLXIXG

SEQ ID NO: 8719 - protein, 19 aa, Artificial sequence
  protein pattern
  Variant (2)..(2): Xaa in position 2 is any amino acid
  Variant (3)..(5): Xaa in position 3 to 5 is any or no amino acid
  Variant (8)..(8): Xaa in position 8 is Leu, Met or Val
  Variant (10)..(10): Xaa in position 10 is Asp or Asn
  Variant (14)..(14): Xaa in position 14 is any amino acid
  Variant (15)..(15): Xaa in position 15 is Ile, Leu or Val
  Variant (16)..(17): Xaa in position 16 to 17 is any amino acid
  Variant (19)..(19): Xaa in position 19 is Lys or Arg
IXXXXAEXKXGVLXXXXPX

SEQ ID NO: 8720 - protein, 14 aa, Artificial sequence
  protein pattern
  Variant (2)..(2): Xaa in position 2 is any amino acid
  Variant (3)..(3): Xaa in position 3 is Gly or Ser
  Variant (4)..(4): Xaa in position 4 is any amino acid
  Variant (6)..(7): Xaa in position 6 to 7 is any amino acid
  Variant (8)..(8): Xaa in position 8 is Arg or Ser
  Variant (9)..(9): Xaa in position 9 is Ile, Leu, Met or Val
  Variant (10)..(10): Xaa in position 10 is any amino acid
  Variant (13)..(13): Xaa in position 13 is Asp, Glu or Thr
  Variant (14)..(14): Xaa in position 14 is Asp, Glu or Asn
SXXXYXXXXXLPXX

SEQ ID NO: 8721 - DNA, 1461 bp, Arabidopsis thaliana
  CDS (1)..(1461)
atggcgttagcatcaaccacgttgccgacgaagtccggattatctctttggtgtccgtcttctccgtctctcgctcgccgatttcccgctcgtttttctccgatcggttctagaatcgcttccagaagcctcgtcactgcttcgttcgctaacgagaatcgcgagtttgtgattgttggtggaggaaatgctgctggttatgctgctagaacttttgtggaaaatggaatggctgatggtcggctatgcattgtgaccaaagaggcttacgcaccttatgagagaccggctttgacaaaagcttacttgttcccaccagagaagaagccagctcgtttaccaggatttcatacttgcgttggaggtggtggagaaaggcaaacaccagattggtataaggagaaaggaattgaggtaatatatgaagatccagtggctggagctgattttgaaaagcaaacactcaccacagacgcagggaagcagttaaaatatggatctctaattatcgctacagggtgtacagcctcaaggttcccagataaaatcggtgggcacttgccaggggttcactatattcgggaggttgcagatgctgattcactgatagcatctctgggaaaggcaaagaaaattgtcattgttggtggtggctacatcggcatggaggttgctgctgcagctgttgcgtggaatctagatacaacgattgtattccctgaagatcagcttttgcaaagattgttcactccatcgcttgctcagaaatatgaagaactgtaccgtcaaaatggtgttaagtttgtcaagggcgcttccataaataacttggaagcaggttcggatgggcgtgtatcagctgttaagcttgctgatgggtctacaattgaggcagacacggttgtaattggaattggagctaagcctgctattggcccctttgaaactttggccatgaacaaatcaattggaggaattcaggtcgatggcttgttcaggacaagtacccctggaatttttgctattggagatgtcgcagccttccctttgaagatatatgataggatgactcgagttgaacatgttgatcacgcccgccgctctgcacaacactgtgtgaaatcactactcacggcacacactgacacgtacgattatcttccatatttctactcaagagtattcgagtatgaaggaagcccaagaaaagtgtggtggcagtttttcggagataatgtgggagaaacagtggaggttgggaactttgacccgaaaatcgctaccttctggattgaatctggcaggttgaaaggtgttctagtagaaagcggatcgcctgaggagttccagcttctaccaaagctagcaagaagccaaccacttgtcgataaggctaaactcgcaagcgcatcttcagtcgaagaagctctcgagattgctcaagccgctctacagagttag

SEQ ID NO: 8722 - protein, 486 aa, Arabidopsis thaliana
MALASTTLPTKSGLSLWCPSSPSLARRFPARFSPIGSRIASRSLVTASFANENREFVIVGGGNAAGYAARTFVENGMADGRLCIVTKEAYAPYERPALTKAYLFPPEKKPARLPGFHTCVGGGGERQTPDWYKEKGIEVIYEDPVAGADFEKQTLTTDAGKQLKYGSLIIATGCTASRFPDKIGGHLPGVHYIREVADADSLIASLGKAKKIVIVGGGYIGMEVAAAAVAWNLDTTIVFPEDQLLQRLFTPSLAQKYEELYRQNGVKFVKGASINNLEAGSDGRVSAVKLADGSTIEADTVVIGIGAKPAIGPFETLAMNKSIGGIQVDGLFRTSTPGIFAIGDVAAFPLKIYDRMTRVEHVDHARRSAQHCVKSLLTAHTDTYDYLPYFYSRVFEYEGSPRKVWWQFFGDNVGETVEVGNFDPKIATFWIESGRLKGVLVESGSPEEFQLLPKLARSQPLVDKAKLASASSVEEALEIAQAALQS

SEQ ID NO: 8723 - DNA, 1440 bp, Oryza sativa
  CDS (1)..(1440)
atgggccgcgcgttcgagtacgtgatcctgggcggcggcgtggccgccggctacgcggcgctcgagttcgtccgccgcaacggcggcgcatccagccaggagctctgcatcatctccgacgagcactttgctccttatgagcgtcctgcattaagcaaaggctatttgctcccacaagacgcgccgcgtctaccggcatttcatacttgcgttggttctaaggatgagttacttaccgaagaatggtacaacgaacacggcattgtacttgttcttggaacgagggtgatttctgctgatgtgcggcagaagacattgcttacatccagtggggaaaccatcagctataaaactcttatcgttgccacgggtgctcgggccgtgaagctggaagaatttggagtgagcggttcagatgcgaggaacgtctgctatctgcgcaatgtggaggatgcagacaaattagtcggtgtaatgagatcatgtcccggtggaaatgccgttgtcgtcggtggtggatacataggaatggaatgtgcagcggcattggtcacaaacaacataaaagttaccatggtcttccctaaaaaacactgcatgggtcgtctttttacaccgaaaattgctgagttttatgagagctattacgcttcaagaggagttactttcgtcaaagaagctgcggttacttccatgcagatatcagctggaaaggtgactgcagtgaacttgggaaacggtaggcggcttcctgccgacatggtcgtcgtcggcgtcggcgcccgcgcgaacaccgggctgttcgacggccagctggtcatggagaacggcgggatcaaggtgaacggacggatgcaggcgagcgacgcctcggtgtacgccgtgggcgacgtggccgcgttccccgtcaagctgttcggcggcgacgtccgccggctggagcacgtcgactgcgcgcgccggaccgcgcggcacgccgtcgcggcgatgctggagggcaccggatcggtggggcacatcgactacctgccattcttctactccagggtcttctcgctgtcgtggcagttctacggcgacaacgccggggaagccgtgcacttcggggacctcgcgccgcccggcgacggcgacggcgccgcccccaagttcggcgcgtactgggtccgcgacggccgcgtcgccggcgcgttcctcgagggcgggagccggcaggagtacgaggccgtggcggccgccgtccgccgcggggccgcggtggccgacgtcgcggagctcgagaggcgaggcctcgcgttcgccacccaggccaccggcggcggtggcaagcccacctgcgcatggcacgccacggtgggcgtcgccgcggccgtgtccatcgccgccttcgcctgctggtacggctggcaggcgccgtacgtgctcaagcgagacttctga

SEQ ID NO: 8724 - protein, 479 aa, Oryza sativa
MGRAFEYVILGGGVAAGYAALEFVRRNGGASSQELCIISDEHFAPYERPALSKGYLLPQDAPRLPAFHTCVGSKDELLTEEWYNEHGIVLVLGTRVISADVRQKTLLTSSGETISYKTLIVATGARAVKLEEFGVSGSDARNVCYLRNVEDADKLVGVMRSCPGGNAVVVGGGYIGMECAAALVTNNIKVTMVFPKKHCMGRLFTPKIAEFYESYYASRGVTFVKEAAVTSMQISAGKVTAVNLGNGRRLPADMVVVGVGARANTGLFDGQLVMENGGIKVNGRMQASDASVYAVGDVAAFPVKLFGGDVRRLEHVDCARRTARHAVAAMLEGTGSVGHIDYLPFFYSRVFSLSWQFYGDNAGEAVHFGDLAPPGDGDGAAPKFGAYWVRDGRVAGAFLEGGSRQEYEAVAAAVRRGAAVADVAELERRGLAFATQATGGGGKPTCAWHATVGVAAAVSIAAFACWYGWQAPYVLKRDF

SEQ ID NO: 8725 - DNA, 1431 bp, Oryza sativa
  CDS (1)..(1431)
atggggcgggcgttcgtgcacgtgatcctcggcggcggcgtggccgccggctacgcggcgctcgagttcgcccgccgcggcggctactcccgcggcgagctctgcatcatctccgaagagacggttgctccttatgaacgtccggcactaagcaaaggctatttactcccagaaggtgccgctcgtcttccaggatttcatacctgcgttggtgccaatgatgaattactgacggcaaaatggtacaaagaaaatggtattgaacttgttcttggaacaaaagtgataaccgctgatgtaaggatgaagacattgcttacagccactggagaaactatcagctataagaatcttatcattgcgaccggtgctcgggctttgaagctggaagagtttggaatcagtggatcagatgcttcgaacatatgttatttgcgcaatcttgatgatgcggataagttagtgaatgtgatgaaatcatgtcctggtggaaatgctgtcgtcattggtggtggctatataggaatggagtgcgcagcagcattggttactaataggataaaagtaaccatggtcttccctgaaagccactgcatggcccgtctatttacaccaaaaattgcagaatattatgagaactattacacttcaaaaggtgttacctttgtcaaaggaactgtgcttacatcctttgaaaaagattcgacagggaaggtgacttcagtaatcctgaaagatggtaaacaccttcctgccgatatggttgtggttggtattggcatccgtgcaagcactggtctttttgaaggtcagctgttgatggagcaaggtgggataaaggtaaacggacaaatgttaacaagcgatggttctgtatatgccgttggcgatgttgctgccttccctatcaagctctttgatggtgttatacgacggcttgagcatgttgactcagctcgcagaacagcgagacatgctgttgcagccatcctggagccttcaaaaactaaggacatcgattacctgccattcttctactccagggtcttcacattatcctggcaattctatgggaacaataccggagaagtggttcactttggagacttcacaaacagcagcccaaggtttggtgcctattgggttgataaaagccggattaggggtgcatttcttgaaggtggaagtcgagaagaatacgaggcgatatcgaatgttgttcggcgtaaagctaaggttataaacattgctgaacttgaaaagcaaggtctgatgtttgccattcaagaaagccagaaggacttgcctgatggtgggcttgctcttggtgaaaagcctacatatgtatggcatgcaacggctggtgtcattgcagctgcgtccattgctgcatttggttattggtacggcaggaaacgccgtaggtggtga

SEQ ID NO: 8726 - protein, 476 aa, Oryza sativa
MGRAFVHVILGGGVAAGYAALEFARRGGYSRGELCIISEETVAPYERPALSKGYLLPEGAARLPGFHTCVGANDELLTAKWYKENGIELVLGTKVITADVRMKTLLTATGETISYKNLIIATGARALKLEEFGISGSDASNICYLRNLDDADKLVNVMKSCPGGNAVVIGGGYIGMECAAALVTNRIKVTMVFPESHCMARLFTPKIAEYYENYYTSKGVTFVKGTVLTSFEKDSTGKVTSVILKDGKHLPADMVVVGIGIRASTGLFEGQLLMEQGGIKVNGQMLTSDGSVYAVGDVAAFPIKLFDGVIRRLEHVDSARRTARHAVAAILEPSKTKDIDYLPFFYSRVFTLSWQFYGNNTGEVVHFGDFTNSSPRFGAYWVDKSRIRGAFLEGGSREEYEAISNVVRRKAKVINIAELEKQGLMFAIQESQKDLPDGGLALGEKPTYVWHATAGVIAAASIAAFGYWYGRKRRRW

SEQ ID NO: 8727 - DNA, 1521 bp, Oryza sativa
  CDS (1)..(1521)
atgacctcagaggtggccgtagctctccggcggaaggcggcggagatggcttccacggccgcggcggcgtcgtcgcaggggtgcatctcgtgggcgctgcggcagcgtgggcttggtggtggtggtgcgcgggctgtcccggtgcttccccgccggagattctgcgtctccgcggcggcgggtgcggggttcgacaacgagaatcgcgagtatgtgatcgtgggtggaggcaacgcggccggttacgcggcgaggacgttcgtcgagcacggcatggctgatggccgcctttgcatcgtctccaaggaggcgtatccgccatatgagcgaccagcactgacaaagggctatcttttccctccagacaagaagcctgctcgtctacctggctttcatacctgtgttggatcaggtgggcagaggcagactgctgaatggtacaaggagaacggcatagaggtattgtatgaggatccagttgtagcgtttgatggcaaaacacataccttaaaaacttcatcagggaaaattctgaagtatgggtcacttattatttctactggctgtgaagcttcaaggttacctgctaagattggaggaaatttgcctggagttcactatatacgtgatgttgctgatgcggattctctagtatcttcattgggaaaagcaaagaaaattgttgttattggtgggggctatattggcatggaggtagcagcagcagcttgtggctggaatctcgacacaactattatattcccagaggaccacattatgccaagactctttacaccttcccttgctaagaagtatgaggaactgtatcagcaaaatggtgtcaaattcattaagggagctcttattgataaacttgaagctggctctgatggtagggtgtcatctgcagtacttgaagatggatctgtagttgaagctgatacagttattgttggtataggagcaagaccagttattggcccatttgaagctgttggggtcaacactaaagttggtggaatagaggttgattccttgtttagaactagtatacctggtatctttgctattggagatgtagcagcttttcccctcaagatgtatgatagaatgactcgagttgagcatgtggatcatgctcggaagtctgcacaccactgtgttgaagcactcctaacatcacacacaaagccgtatgactaccttccatatttctattcaagagtttttgagtacgaaggaagttcaaggaaaatttggtggcaattttacggtgataatgttggcgaaacaattgaagtgggaagctttgaaccaaagattgctaccttctggattgactctgatagtcgactgaagggtgttttccttgagagtggtagctcagaggaattttcgcttcttcctcaactcgctaagtctcagcccgttgtagacaaagctaagctcaaaagtgcaacctctgtcgaggatgccttagagatcgcaagaagctctctccactctggttcttctgtttag

SEQ ID NO: 8728 - protein, 506 aa, Oryza sativa
MTSEVAVALRRKAAEMASTAAAASSQGCISWALRQRGLGGGGARAVPVLPRRRFCVSAAAGAGFDNENREYVIVGGGNAAGYAARTFVEHGMADGRLCIVSKEAYPPYERPALTKGYLFPPDKKPARLPGFHTCVGSGGQRQTAEWYKENGIEVLYEDPVVAFDGKTHTLKTSSGKILKYGSLIISTGCEASRLPAKIGGNLPGVHYIRDVADADSLVSSLGKAKKIVVIGGGYIGMEVAAAACGWNLDTTIIFPEDHIMPRLFTPSLAKKYEELYQQNGVKFIKGALIDKLEAGSDGRVSSAVLEDGSVVEADTVIVGIGARPVIGPFEAVGVNTKVGGIEVDSLFRTSIPGIFAIGDVAAFPLKMYDRMTRVEHVDHARKSAHHCVEALLTSHTKPYDYLPYFYSRVFEYEGSSRKIWWQFYGDNVGETIEVGSFEPKIATFWIDSDSRLKGVFLESGSSEEFSLLPQLAKSQPVVDKAKLKSATSVEDALEIARSSLHSGSSV

SEQ ID NO: 8729 - DNA, 1509 bp, Oryza sativa
  CDS (1)..(1509)
atgacctcagctctccggcggaaggcggcggagatggcttccacggccgcggcggcgtcgtcgcaggggtgcatctcgtgggcgctgcggcagcgtgggcttggtggtggtggtgcgcgggctgtcccggtgcttccccgccggagattctgcgtctccgcggcggcgggtgcggggttcgacaacgagaatcgcgagtatgtgatcgtgggtggaggcaacgcggccggttacgcggcgaggacgttcgtcgagcacggcatggctgatggccgcctttgcatcgtctccaaggaggcgtatccgccatatgagcgaccagcactgacaaagggctatcttttccctccagacaagaagcctgctcgtctacctggctttcatacctgtgttggatcaggtgggcagaggcagactgctgaatggtacaaggagaacggcatagaggtattgtatgaggatccagttgtagcgtttgatggcaaaacacataccttaaaaacttcatcagggaaaattctgaagtatgggtcacttattatttctactggctgtgaagcttcaaggttacctgctaagattggaggaaatttgcctggagttcactatatacgtgatgttgctgatgcggattctctagtatcttcattgggaaaagcaaagaaaattgttgttattggtgggggctatattggcatggaggtagcagcagcagcttgtggctggaatctcgacacaactattatattcccagaggaccacattatgccaagactctttacaccttcccttgctaagaagtatgaggaactgtatcagcaaaatggtgtcaaattcattaagggagctcttattgataaacttgaagctggctctgatggtagggtgtcatctgcagtacttgaagatggatctgtagttgaagctgatacagttattgttggtataggagcaagaccagttattggcccatttgaagctgttggggtcaacactaaagttggtggaatagaggttgattccttgtttagaactagtatacctggtatctttgctattggagatgtagcagcttttcccctcaagatgtatgatagaatgactcgagttgagcatgtggatcatgctcggaagtctgcacaccactgtgttgaagcactcctaacatcacacacaaagccgtatgactaccttccatatttctattcaagagtttttgagtacgaaggaagttcaaggaaaatttggtggcaattttacggtgataatgttggcgaaacaattgaagtgggaagctttgaaccaaagattgctaccttctggattgactctgatagtcgactgaagggtgttttccttgagagtggtagctcagaggaattttcgcttcttcctcaactcgctaagtctcagcccgttgtagacaaagctaagctcaaaagtgcaacctctgtcgaggatgccttagagatcgcaagaagctctctccactctggttcttctgtttag

SEQ ID NO: 8730 - protein, 502 aa, Oryza sativa
MTSALRRKAAEMASTAAAASSQGCISWALRQRGLGGGGARAVPVLPRRRFCVSAAAGAGFDNENREYVIVGGGNAAGYAARTFVEHGMADGRLCIVSKEAYPPYERPALTKGYLFPPDKKPARLPGFHTCVGSGGQRQTAEWYKENGIEVLYEDPVVAFDGKTHTLKTSSGKILKYGSLIISTGCEASRLPAKIGGNLPGVHYIRDVADADSLVSSLGKAKKIVVIGGGYIGMEVAAAACGWNLDTTIIFPEDHIMPRLFTPSLAKKYEELYQQNGVKFIKGALIDKLEAGSDGRVSSAVLEDGSVVEADTVIVGIGARPVIGPFEAVGVNTKVGGIEVDSLFRTSIPGIFAIGDVAAFPLKMYDRMTRVEHVDHARKSAHHCVEALLTSHTKPYDYLPYFYSRVFEYEGSSRKIWWQFYGDNVGETIEVGSFEPKIATFWIDSDSRLKGVFLESGSSEEFSLLPQLAKSQPVVDKAKLKSATSVEDALEIARSSLHSGSSV

SEQ ID NO: 8731 - DNA, 1476 bp, Oryza sativa
  CDS (1)..(1476)
atggcttccacggccgcggcggcgtcgtcgcaggggtgcatctcgtgggcgctgcggcagcgtgggcttggtggtggtggtgcgcgggctgtcccggtgcttccccgccggagattctgcgtctccgcggcggcgggtgcggggttcgacaacgagaatcgcgagtatgtgatcgtgggtggaggcaacgcggccggttacgcggcgaggacgttcgtcgagcacggcatggctgatggccgcctttgcatcgtctccaaggaggcgtatccgccatatgagcgaccagcactgacaaagggctatcttttccctccagacaagaagcctgctcgtctacctggctttcatacctgtgttggatcaggtgggcagaggcagactgctgaatggtacaaggagaacggcatagaggtattgtatgaggatccagttgtagcgtttgatggcaaaacacataccttaaaaacttcatcagggaaaattctgaagtatgggtcacttattatttctactggctgtgaagcttcaaggttacctgctaagattggaggaaatttgcctggagttcactatatacgtgatgttgctgatgcggattctctagtatcttcattgggaaaagcaaagaaaattgttgttattggtgggggctatattggcatggaggtagcagcagcagcttgtggctggaatctcgacacaactattatattcccagaggaccacattatgccaagactctttacaccttcccttgctaagaagtatgaggaactgtatcagcaaaatggtgtcaaattcattaagggagctcttattgataaacttgaagctggctctgatggtagggtgtcatctgcagtacttgaagatggatctgtagttgaagctgatacagttattgttggtataggagcaagaccagttattggcccatttgaagctgttggggtcaacactaaagttggtggaatagaggttgattccttgtttagaactagtatacctggtatctttgctattggagatgtagcagcttttcccctcaagatgtatgatagaatgactcgagttgagcatgtggatcatgctcggaagtctgcacaccactgtgttgaagcactcctaacatcacacacaaagccgtatgactaccttccatatttctattcaagagtttttgagtacgaaggaagttcaaggaaaatttggtggcaattttacggtgataatgttggcgaaacaattgaagtgggaagctttgaaccaaagattgctaccttctggattgactctgatagtcgactgaagggtgttttccttgagagtggtagctcagaggaattttcgcttcttcctcaactcgctaagtctcagcccgttgtagacaaagctaagctcaaaagtgcaacctctgtcgaggatgccttagagatcgcaagaagctctctccactctggttcttctgtttag

SEQ ID NO: 8732 - protein, 491 aa, Oryza sativa
MASTAAAASSQGCISWALRQRGLGGGGARAVPVLPRRRFCVSAAAGAGFDNENREYVIVGGGNAAGYAARTFVEHGMADGRLCIVSKEAYPPYERPALTKGYLFPPDKKPARLPGFHTCVGSGGQRQTAEWYKENGIEVLYEDPVVAFDGKTHTLKTSSGKILKYGSLIISTGCEASRLPAKIGGNLPGVHYIRDVADADSLVSSLGKAKKIVVIGGGYIGMEVAAAACGWNLDTTIIFPEDHIMPRLFTPSLAKKYEELYQQNGVKFIKGALIDKLEAGSDGRVSSAVLEDGSVVEADTVIVGIGARPVIGPFEAVGVNTKVGGIEVDSLFRTSIPGIFAIGDVAAFPLKMYDRMTRVEHVDHARKSAHHCVEALLTSHTKPYDYLPYFYSRVFEYEGSSRKIWWQFYGDNVGETIEVGSFEPKIATFWIDSDSRLKGVFLESGSSEEFSLLPQLAKSQPVVDKAKLKSATSVEDALEIARSSLHSGSSV

SEQ ID NO: 8733 - DNA, 1308 bp, Oryza sativa
  CDS (1)..(1308)
atggcggccgcgaagcacttcacctacgtcatcctcggcggaggcgtcgccgcgggatacgctgcgcgggagttcgccaagcagggcgtcaagcccggggaactcgccatcatctccaaggaatcggtggctccctacgagcgtcctgctctcagcaagggatacctctttcctcagaatgcagccagacttccgggattccacacctgcgtcgggagcggcggagagaggctcttgcctgaatggtattccgagaaaggtatcgagctgatcctgagcaccgaaattgtcaaggctgatcttgcctccaagacattgaccagttcagctgatgcaacctttacctatgacactttgctcattgccactggctcctcggtcataaagctcactgactttggtgttcaaggagcagaggccaacgacatattgtacctgagggatattgaggacgctgacaagttggtcgcggctatgcaagccaagaaggatggaaaggctgtgattgtcggaggtggctacataggacttgagcttagcgcagccttgaagaccaacaattttgatgtcactatggtgtaccctgaaccttggtgcatgccccgtctcttcacttctggccttgctgctttctacgagggatactacgctaacaaaggaatccatatcataaagggaaccgtggctgttggttttgatgctgatgccaatggagatgttactgcggtgaagctaaagaatggaaacgtgctggaagctgacattgttattgtcggtgtcggtggcaggccactgactcatctcttcaagggtcaagttgcagaggagaagggtggaatcaagactgatgcattcttcgaaacgagcgttcctggtgtatacgccattgccgacgtggccgccttcccgatgaagctatacaatgagattaggagagtagagcatgttgaccatgctcgcaaatcagccgagcaggccgtgaaggcgatcaaggcgaaggaggccggcgagtcggtgccggagtacgactacctgccctacttctactcccggtcgttcgacctctcgtggcagttctacggcgacaacgtcggcgaggatgtgctgttcggcgacaacgaccccacggcggccaagcccaagttcggctcgtactggatcaaggacggcaaggtcgtcggcgtcttcctcgagggcggctcggcggaggagaatcaggtcattgccaaggtcgccagagctcagccgccggtggccgacgtcgaggctctcaagaaggaaggactcgacttcgctgccaaagtctga

SEQ ID NO: 8734 - protein, 435 aa, Oryza sativa
MAAAKHFTYVILGGGVAAGYAAREFAKQGVKPGELAIISKESVAPYERPALSKGYLFPQNAARLPGFHTCVGSGGERLLPEWYSEKGIELILSTEIVKADLASKTLTSSADATFTYDTLLIATGSSVIKLTDFGVQGAEANDILYLRDIEDADKLVAAMQAKKDGKAVIVGGGYIGLELSAALKTNNFDVTMVYPEPWCMPRLFTSGLAAFYEGYYANKGIHIIKGTVAVGFDADANGDVTAVKLKNGNVLEADIVIVGVGGRPLTHLFKGQVAEEKGGIKTDAFFETSVPGVYAIADVAAFPMKLYNEIRRVEHVDHARKSAEQAVKAIKAKEAGESVPEYDYLPYFYSRSFDLSWQFYGDNVGEDVLFGDNDPTAAKPKFGSYWIKDGKVVGVFLEGGSAEENQVIAKVARAQPPVADVEALKKEGLDFAAKV

SEQ ID NO: 8735 - DNA, 1365 bp, Glycine max
  CDS (1)..(1365)
atggccgcaatatccaactccttatcacttaagcatagtttctctctccttcttccacttccatcaaattcacaagatgtacgtgatgctgcgcgcactttcgttgagcatggaatggccgatggtcgtctctgtattgtaaccaaagagccttatgcaccttacgagcgtcccgctctgacgagagcgtatttgttcccgccggataagaaaccagcacgccttcccggttttcacacttgtgttggatccggtggagagaggcagactccggagtggtataaagagaatgtgatagagatgttgtatgaagatccagtaaaagatattgatattgaaaagcatacattgacaacaagttctggaaaacttctgaagtatggttcgcttattattgctacaggatgcacggcatcaaggtttccagagaagattgggggaaacctacctggtgttcactatattcggcatgttgcagatgctgatacactaattttatcattggaaaaagcaaaaaaggttgtagttgtcagaggtggttatataggaatggaggttgctgctgcagctgttggttggaaacttgatgcaacaatcatatttccagaagatgaccttttgcaaagactgtttactccttctcttgctcggagatatgaagaactctatcaaaagaatggagtcaaagtcttgaaggtatttcctccttccctgttcttctctctttcttcccattattctggttctaatggacatgtagctgctgtgaaacttggagatggatctattttggaggcggatacggtaattataggcattggagcaagacctgctgtaagcccctttgagagggtgggccagaatacagatgttggtggtatacaggttgatggtcagttccggacaagcactcctggaatctttgctgttggtgatgtagcagcttttcctttgaagatctataaccgtatctctcgagttgagcatgtagatcatgcccgtcgctctgcacagcactgtgtgaaagcattactcagtatgactatcttccatacttctattcaaggatttttgaatatgaaggaagccctagaaaagtgtggtggcagttctttagagacaagggcaattggagaaacagttgaaattggaaattttgatcctaaaatagctaccttctggattgaatctggtaagctgaaaggagttcttcttgaaagtgggagccctgaggaatttcaactcctgcctaaacttgccagaagtcagcctctgattgataaagcaaaacttcaaaatgcaacttcagtagaggaggccctagagattgctcgaggatccttgcaaggcgaagctgttgtctag

SEQ ID NO: 8736 - protein, 454 aa, Glycine max
MAAISNSLSLKHSFSLLLPLPSNSQDVRDAARTFVEHGMADGRLCIVTKEPYAPYERPALTRAYLFPPDKKPARLPGFHTCVGSGGERQTPEWYKENVIEMLYEDPVKDIDIEKHTLTTSSGKLLKYGSLIIATGCTASRFPEKIGGNLPGVHYIRHVADADTLILSLEKAKKVVVVRGGYIGMEVAAAAVGWKLDATIIFPEDDLLQRLFTPSLARRYEELYQKNGVKVLKVFPPSLFFSLSSHYSGSNGHVAAVKLGDGSILEADTVIIGIGARPAVSPFERVGQNTDVGGIQVDGQFRTSTPGIFAVGDVAAFPLKIYNRISRVEHVDHARRSAQHCVKALLSMTIFHTSIQGFLNMKEALEKCGGSSLETRAIGETVEIGNFDPKIATFWIESGKLKGVLLESGSPEEFQLLPKLARSQPLIDKAKLQNATSVEEALEIARGSLQGEAVV

SEQ ID NO: 8737 - DNA, 1809 bp, Glycine max
  CDS (105)..(1541)
gcacgaggcaagagtattcggtttgattgattgtattacagtgtcattttccttcataaccgatttctattttatgattgtgcgcaacagttcgcagactcacaatggccgcaatatccaactccttatcactgaagcacagtttctctctgagtcgagcttctccttcttcctcttccatcaaattcaaattcagaagatgttacgccgcgttcgccaatgagaatcgcgagtacgtgatcgttggcggcggaaatgccgcgggatatgctgcgcgcactttcgttgagcatggaatggctgatggtcgtctctgtattgtaaccaaagagccgtatgcaccttacgagcgtcccgctctgacgaaagcgtatttgttcccgccggataagaaaccagcacgccttcctggttttcacacttgtgttggatccggtggagagaggcagactccggggtggtataaagagaatgggatagagatgttgtatgaagatccagtaaaagatattgatattgaaaagcatactttgacaacaagttctggaaaacttctgaagtatggttcgcttgttattgctacaggatgtacggcatcaaggtttccagagaaaattgggggaaacctacctggtgttcactatattcgggatgttggagatgccgatgcactaattttatcgttggagaaagcaaaaaaggttgtagttgttggaggtggttatataggaatggaggttgctgctgctgctgttggttggaaacttgatacaacaatcatattcccagaagatcaccttttgcaaagactgtttactccttctcttgcccggagatatgaagaactctatcaaaagaatggagtcaaaatcttgaagggtgcttccataaaaaatttggaagctggttctaatggacatgtagctgctgtgaaacttggagatggatctcttgtggaggcagatacggtaattataggcattggagcaaaacctgctgtgactccctttgagagggtgggcctgaatacagaggttggtggtatacaggttgatggtcagtttcggacaagcactcccggaatctttgctgttggtgatgtagcagctttccctttgaagatttataatcgtatctctcgagtggagcatgtggatcatgcccgtcgctctgcacagcactgtgtgaaagcattactcagtgcacaaactcacacgtatgattatcttccatacttctactcgaggatttttgaatatgaaggaagccctagaaaagtgtggtggcagttctttggagacaatgttggagaaacagttgaaattggaaattttgatcctaaaatatctaccttctggattgaatctggtaagctgaaaggagttcttcttgaaagtgggagccctgaggaatttcaactcctgcctaaacttgccagaagtcagcctctgattgataaagccaaacttcaaaatgcaacatcagtggaggaggccctagagattgctcgggaatccttgcaaggcgaagctgctgtctagtaccgatcttggtaacatcattctgtaatttatcttctcttacggccagattatcagtgactatctgtcatcatctgagtagggattgctccttaagagaataattttcattacattctcagtcacctgacattagtaatggtttttaactggaatgtctaatttggatttgatctggtgccataaggtatccttgaattttctcaataatttaagatagcctttgcctttaaaaaaaaaaaaaaaaaaaaaaaaaaaaaaaaaaaaa

SEQ ID NO: 8738 - protein, 478 aa, Glycine max
MAAISNSLSLKHSFSLSRASPSSSSIKFKFRRCYAAFANENREYVIVGGGNAAGYAARTFVEHGMADGRLCIVTKEPYAPYERPALTKAYLFPPDKKPARLPGFHTCVGSGGERQTPGWYKENGIEMLYEDPVKDIDIEKHTLTTSSGKLLKYGSLVIATGCTASRFPEKIGGNLPGVHYIRDVGDADALILSLEKAKKVVVVGGGYIGMEVAAAAVGWKLDTTIIFPEDHLLQRLFTPSLARRYEELYQKNGVKILKGASIKNLEAGSNGHVAAVKLGDGSLVEADTVIIGIGAKPAVTPFERVGLNTEVGGIQVDGQFRTSTPGIFAVGDVAAFPLKIYNRISRVEHVDHARRSAQHCVKALLSAQTHTYDYLPYFYSRIFEYEGSPRKVWWQFFGDNVGETVEIGNFDPKISTFWIESGKLKGVLLESGSPEEFQLLPKLARSQPLIDKAKLQNATSVEEALEIARESLQGEAAV

SEQ ID NO: 8739 - DNA, 1927 bp, Glycine max
  CDS (98)..(1534)
ccacgcgtccgcgatttgattgattgtattacagtgtcattttccttcgtccccgattcccgggtcacgcctccgccccgcagttcgcagactcacaatggccgcaatatccaactccttatcactgaagcacagtttctctctgagtcgagctcctccttcttcctcttccatcaaattcaaattcagaagatgttacgccgcgttcgccaatgagaatcgcgagtacgtgatcgttggcggcggaaatgccgcgggatatgctgcgcgcactttcgttgagcatggaatggctgatggtcgtctctgtattgtaaccaaagagccgtatgcaccttacgagcgtcccgctctgacgaaagcgtatttgttcccgccggataagaaaccagcacgccttcctggttttcacacttgtgttggatccggtggagagaggcagactccggggtggtataaagagaatgggatagagatgttgtatgaagatccagtaaaagatattgatattgaaaagcatactttgacaacaagttctggaaaacttctgaagtatggttcgcttgttattgctacaggatgtacggcatcaaggtttccagagaaaattgggggaaacctacctggtgttcactatattcgggatgttggagatgccgatgcactaattttatcgttggagaaagcaaaaaaggttgtagttgttggaggtggttatataggaatggaggttgctgctgctgctgttggttggaaacttgatacaacaatcatattcccagaagatcaccttttgcaaagactgtttactccttctcttgcccggagatatgaagaactctatcaaaagaatggagtcaaaatcttgaagggtgcttccataaaaaatttggaagctggttctaatggacatgtagctgctgtgaaacttggagatggatctcttgtggaggcagatacggtaattataggcattggagcaaaacctgctgtgactccctttgagagggtgggcctgaatacagaggttggtggtatacaggttgatggtcagtttcggacaagcactcccggaatctttgctgttggtgatgtagcagctttccctttgaagatttataatcgtatctctcgagtggagcatgtggatcatgcccgtcgctctgcacagcactgtgtgaaagcattactcagtgcacaaactcacacgtatgattatcttccatacttctactcgaggatttttgaatatgaaggaagccctagaaaagtgtggtggcagttctttggagacaatgttggagaaacagttgaaattggaaattttgatcctaaaatatctaccttctggattgaatctggtaagctgaaaggagttcttcttgaaagtgggagccctgaggaatttcaactcctgcctaaacttgccagaagtcagcctctgattgataaagccaaacttcaaaatgcaacatcagtggaggaggccctagagattgctcgggaatccttgcaaggcgaagctgctgtctagtaccgatcttggtaacatcattctgtaatttatcttctcttacggccagattatcagtgactatctgtcatcatctgagtagggattgctccttaagagaataattttcattacattctcagtcacctgacattagtaatggtttttaactggaatgtctaatttggatttgatctggtgccataaggtatccttgaattttctcaataatttaagatagcctttgcctttaaaaaaaaaaataaccaaacagcaatgtgatttttgttcttaacttactacctacaacccttcttctgaagggactcctgtagggaattctgtctgcagaaagagttgtctcatttaaaatttcaagcctggacctaaaaaggcatattttctcttgtaaaa

SEQ ID NO: 8740 - protein, 478 aa, Glycine max
MAAISNSLSLKHSFSLSRAPPSSSSIKFKFRRCYAAFANENREYVIVGGGNAAGYAARTFVEHGMADGRLCIVTKEPYAPYERPALTKAYLFPPDKKPARLPGFHTCVGSGGERQTPGWYKENGIEMLYEDPVKDIDIEKHTLTTSSGKLLKYGSLVIATGCTASRFPEKIGGNLPGVHYIRDVGDADALILSLEKAKKVVVVGGGYIGMEVAAAAVGWKLDTTIIFPEDHLLQRLFTPSLARRYEELYQKNGVKILKGASIKNLEAGSNGHVAAVKLGDGSLVEADTVIIGIGAKPAVTPFERVGLNTEVGGIQVDGQFRTSTPGIFAVGDVAAFPLKIYNRISRVEHVDHARRSAQHCVKALLSAQTHTYDYLPYFYSRIFEYEGSPRKVWWQFFGDNVGETVEIGNFDPKISTFWIESGKLKGVLLESGSPEEFQLLPKLARSQPLIDKAKLQNATSVEEALEIARESLQGEAAV

SEQ ID NO: 8741 - DNA, 1308 bp, Oryza sativa Japonica Group
  CDS (1)..(1308)
atggcgtcggagaagcacttcaagtacgtcatcctcggcggcggcgtcgcagcgggatatgcggcacgggagttcgccaagcagggtgttaagccaggggagctcgccatcatctccaaggaggccgtggctccttatgagcgccctgctctcagcaagggatacctctttcctcagaatgctgcaagactcccaggatttcatgtgtgtgtcggcagtggaggagagaggcttttgcccgaatggtactcagagaaaggcattgagttgatcctgagcactgaaattgtcaaagctgatcttgcctccaagactttgactagtgcagttggagcaacctttacatatgagattttgatcattgcaactggctcctcagtcatcaagctatcagattttggtactcaaggagctgattccaacaacattttatatctaagggaagtagatgatgctgacaagctggttgcagctatccaagcaaagaagggtggaaaggcagttattgtaggaggaggttacattggtctagaacttagtgctgcattgaagatcaatgattttgatgtcacgatggtgtttcctgaaccttggtgcatgcctcgtctcttcactgctgatatcgcggctttctatgagagttactacactaacaaaggagttaagatcgtgaagggtacagtagctgttggttttgatgctgatgctaatggtgatgtcacagcagttaacctgaagaatggcagtgtgcttgaagctgatattgttgttgttggtgttgggggcagaccgctgactactctctttaaaggtcaagttgctgaggagaaaggtggaattaagaccgatgctttctttgaaacaagtgttcctggagtctatgctgtcggtgatgtggccaccttccccatgaagatgtacaatgagttgaggagagtggaacatgttgaccatgctaggaagtctgcagagcaggctgtaaaggcaatcaagggaaaagagtccggcgagtccgttgtggagtatgactatctgccatacttctactcccggtcattcgacctgggatggcaattctacggcgacaacgttggcgacaccatcctgttcggagacagtgacccgacctctgccaagcccaagttcgggtcctactggatcaaggacggcaaggtgttgggtgccttcctggagggtgggtcacctgatgagaacaaggccattgccaaggtcgcgaaaactcagccgcccgttgccaacatagaggagctcaagaaggaaggcctccagttcgccagcaaaatatga

SEQ ID NO: 8742 - protein, 435 aa, Oryza sativa Japonica Group
MASEKHFKYVILGGGVAAGYAAREFAKQGVKPGELAIISKEAVAPYERPALSKGYLFPQNAARLPGFHVCVGSGGERLLPEWYSEKGIELILSTEIVKADLASKTLTSAVGATFTYEILIIATGSSVIKLSDFGTQGADSNNILYLREVDDADKLVAAIQAKKGGKAVIVGGGYIGLELSAALKINDFDVTMVFPEPWCMPRLFTADIAAFYESYYTNKGVKIVKGTVAVGFDADANGDVTAVNLKNGSVLEADIVVVGVGGRPLTTLFKGQVAEEKGGIKTDAFFETSVPGVYAVGDVATFPMKMYNELRRVEHVDHARKSAEQAVKAIKGKESGESVVEYDYLPYFYSRSFDLGWQFYGDNVGDTILFGDSDPTSAKPKFGSYWIKDGKVLGAFLEGGSPDENKAIAKVAKTQPPVANIEELKKEGLQFASKI

SEQ ID NO: 8743 - DNA, 1500 bp, Zea mays
  CDS (1)..(1500)
atgacttcagctctccggcggaaggcggcgcagatggcttccgcggcgacacagtgcttcagctactcctcgttgccggccacgtgggctctgcggcagcggggcggcggtgccagcgtgctccggctctcttcccggcggaccttctcggtctccgcggcggccgggttcgacaaccagaaccgcgagtatgtgatcgtcgggggagggaacgctgcgggttacgccgccaggacgttcgtcgagcatggcatggctgacggccgcctttgcatcgtctccaaggagccagttccaccatacgagcggccagccttgaccaaaggctatctttttcctccggacaagaaaccggctcgcctacctggtttccatacatgcgttggatctggtggacagcgacagactgctgaatggtacaaggagaatggtatagaggtgctgtatgaggatccagttgtagcatttgatggcaaaacgcaaaccttaaagacttcatcggggaaagttctgaaatacggctcacttattatttctactggatgtgaagcatcgagattacctgagaaaattggagggaaattacctggagttcactacatacgggatgttgctgatgctgatgctctagtatcctcattgggaagtgcaaagaaggtggtggttattggtgggggctatattggcatggaggtagctgcagcagcttgtggctggaatcttgacacaactattatattcccagaggaccacattatgccaagattatttacaccctcgcttgctaagaagtatgaggaactgtatcagcaaaatggtgtcaaattcataaagggagctcttatcgaaaaacttggagctggctctgatggaagggtgtcttctgcagtacttaaggatggatctgtagttgaagctgatacagtaattgttggtataggagcaaaaccagttgtcagcccgtttgaagctgttggagttaaccctaaagttggtggaatagaggttgattccttgttcagaactagtgtacctggcatctttgcaattggagatgtagcagcgttccccctgaagatgtacaatagaattgctcgagtggaacatgtggatcatgctcggaagtctgcgcaccactgtgtagagacgctcctaacatcccagacaaaagcgtatgactaccttccatacttctactcgagggtttttgagtacgagggaagttcgaggaaagtctggtggcagttttatggcgacaatgtcggcgaagcagtcgaagtagggaactttgatccaaaggttgcgactttctggatcgactctgatagccggctgaagggtgttttcctcgagagtggaacctcagaggaattctcgcttcttccgcagctcgccaaatctcagcctgttgttgacaagtcaaagctccaggccgcgacttctgttgaagatgcattagagattgcaagaagctcactccggtccagtgccatggtttag

SEQ ID NO: 8744 - protein, 499 aa, Zea mays
MTSALRRKAAQMASAATQCFSYSSLPATWALRQRGGGASVLRLSSRRTFSVSAAAGFDNQNREYVIVGGGNAAGYAARTFVEHGMADGRLCIVSKEPVPPYERPALTKGYLFPPDKKPARLPGFHTCVGSGGQRQTAEWYKENGIEVLYEDPVVAFDGKTQTLKTSSGKVLKYGSLIISTGCEASRLPEKIGGKLPGVHYIRDVADADALVSSLGSAKKVVVIGGGYIGMEVAAAACGWNLDTTIIFPEDHIMPRLFTPSLAKKYEELYQQNGVKFIKGALIEKLGAGSDGRVSSAVLKDGSVVEADTVIVGIGAKPVVSPFEAVGVNPKVGGIEVDSLFRTSVPGIFAIGDVAAFPLKMYNRIARVEHVDHARKSAHHCVETLLTSQTKAYDYLPYFYSRVFEYEGSSRKVWWQFYGDNVGEAVEVGNFDPKVATFWIDSDSRLKGVFLESGTSEEFSLLPQLAKSQPVVDKSKLQAATSVEDALEIARSSLRSSAMV

SEQ ID NO: 8745 - DNA, 1437 bp, Zea mays
  CDS (1)..(1437)
atggggcgcgcgttcgtgtacgtgatcctgggcggcggcgtggccgcgggctacgccgcgctcgagttcgcccgccgcggtgggtactcccgcggagagctctgcatcatctccgaagaggccgttgctccttatgaacgtcctgcactaagcaaaggctatttactcccagaaggtgctgctcgtcttccaggatttcatacttgtgttggtgctaatgatgagttactgacaccgaaatggtacaaagaacaaggcattgaacttgttcttggaacaaaagtgatttctgctgatgtgaggcgcaagacattgcttacaggcactggtgaaactatcagctacaaaactctaattattgcgacaggtgctcgggctttgaagctgcaagaatttggaatacaaggttcagatgcttcaaacatatgttatttgcgcaacatcgatgacgcggataagttggtgagtgtgatgaaatcatgtcctggtggaaatgctgttgtcattggtggtggctacattggaatggagtgtgcagcggcattggttactaacaagattagggtcaccatggtcttccctgagaaacactgcatgggtcgtctatttacaccaaaaattgcagaattttatgaaaactactacacctcgaaaggggtcacctttgttaaaggaactgtgcttacatcctttgaaaaagatacgacggggaaggtgactgcagtaatactcaaagatggtaggcaccttcctgctgatatggtagtagttggtattggcatccgtgcaaacactagcctttttgaaggtcaactgatgatgtcaacagagaatggtgggataaaggtaaatggacagctgcagacaagcgacagctctgtgtatgccgttggcgatgtggccgcgttccccatcaagctttttgacgatgatatccgacggctcgagcatgtggactcagctcgtagaactggtagacatgctgttgcctccatcttggatccttcaaagacgagggacatcgattacctgccgttcttctactccagagtgttcacgttgtcctggcaattctatggggataatgtcggggaagtggtccactttggagacttcacaagcagcagtccgaggttcggtgcatattgggtcaacaaagggcggatcgcgggtgcgtttcttgaaggcggaagtcgggaagagtacgaggccatatcgatcgctgttcggcgggaagctgtggtcacagacatgggtgaactcgagaaacaaggcctggcactcgccattcaggagagccagaaggaggtgcctgacagtgggcttgctgttgtcggaaaacctacttatgcgtggcatgccacagccggtgtcattgcagctgtgtcgattgctgcaattgggtattggtatggcaggaagcgccgcaggtggtga

SEQ ID NO: 8746 - protein, 478 aa, Zea mays
MGRAFVYVILGGGVAAGYAALEFARRGGYSRGELCIISEEAVAPYERPALSKGYLLPEGAARLPGFHTCVGANDELLTPKWYKEQGIELVLGTKVISADVRRKTLLTGTGETISYKTLIIATGARALKLQEFGIQGSDASNICYLRNIDDADKLVSVMKSCPGGNAVVIGGGYIGMECAAALVTNKIRVTMVFPEKHCMGRLFTPKIAEFYENYYTSKGVTFVKGTVLTSFEKDTTGKVTAVILKDGRHLPADMVVVGIGIRANTSLFEGQLMMSTENGGIKVNGQLQTSDSSVYAVGDVAAFPIKLFDDDIRRLEHVDSARRTGRHAVASILDPSKTRDIDYLPFFYSRVFTLSWQFYGDNVGEVVHFGDFTSSSPRFGAYWVNKGRIAGAFLEGGSREEYEAISIAVRREAVVTDMGELEKQGLALAIQESQKEVPDSGLAVVGKPTYAWHATAGVIAAVSIAAIGYWYGRKRRRW

SEQ ID NO: 8747 - DNA, 1467 bp, Arabidopsis thaliana
  CDS (1)..(1467)
atgggaagagctttcgtgtatgtaattctcggaggaggtgttgctgctggttacgcagctctcgaattcacccgtcgaggtgtctccgatggcgaactctgtatcatttccgaagaacccgttgcaccgtatgagaggcctgccttaagcaaaggttttctgctgccagaagctcctgcacggcttccttctttccacacttgtgttggagctaatgatgagaagcttacaccgaaatggtacaaggatcatggaattgaattggtacttggaactcgtgttaagtccgttgatgtgaggaggaagactcttttatcgagcacaggggagactataagttacaaattcttgatcattgcaacaggtgcccgggcgttgaagcttgaagaatttggggtggaaggctcagatgctgaaaatgtttgttacttacgagatctagctgatgcaaataggcttgccactgtgattcaatcaagctccaacgggaatgcggttgttatcggcggtggctatatcggtatggagtgtgctgcatctttagtgatcaacaaaatcaatgtgacgatggttttcccagaggctcactgcatggcacgtctctttacgcccaagattgcaagtttgtatgaagactactacagggctaaaggcgtaaaatttataaaaggaacggttttgacatcatttgagtttgactcgaacaaaaaggttactgcagttaatctcaaagacgggagccacttaccagccgacttggttgtggttggtatcgggatacgaccaaacacaagcttgtttgaaggacagttaacaatagagaaaggagggataaaagtgaacagcagaatgcagtcaagtgacagctcagtgtatgcaataggcgatgtagctacatttccagtgaaactatttggcgaaatgaggaggcttgagcacgtggactcagctaggaaatctgcgcgacacgcagtttcagccatcatggatccaataaagaccggagactttgattacttaccatttttctactcaagggtcttcgcattctcatggcaattctatggagaccctacaggtgatgttgtgcactttggagagtatgaagacgggaaatcatttggagcgtattgggttaaaaagggtcaccttgttggatcttttcttgaaggaggcactaaagaagaatatgaaactatctcaaaggcgacacaattgaaaccagctgtgactattgatttggaagaattggaaagagaaggactcgggtttgctcacacggttgtgagtcagcagaaagttcctgaagttaaggatattccgagcgctgagatggtgaagcaatctgcaagtgtggtcatgataaagaagcctttgtatgtatggcacgcagctactggagtcgttgtggctgcatctgtggctgcgttcgcgttttggtatgggaggagacgccgtagatggtga

SEQ ID NO: 8748 - protein, 488 aa, Arabidopsis thaliana
MGRAFVYVILGGGVAAGYAALEFTRRGVSDGELCIISEEPVAPYERPALSKGFLLPEAPARLPSFHTCVGANDEKLTPKWYKDHGIELVLGTRVKSVDVRRKTLLSSTGETISYKFLIIATGARALKLEEFGVEGSDAENVCYLRDLADANRLATVIQSSSNGNAVVIGGGYIGMECAASLVINKINVTMVFPEAHCMARLFTPKIASLYEDYYRAKGVKFIKGTVLTSFEFDSNKKVTAVNLKDGSHLPADLVVVGIGIRPNTSLFEGQLTIEKGGIKVNSRMQSSDSSVYAIGDVATFPVKLFGEMRRLEHVDSARKSARHAVSAIMDPIKTGDFDYLPFFYSRVFAFSWQFYGDPTGDVVHFGEYEDGKSFGAYWVKKGHLVGSFLEGGTKEEYETISKATQLKPAVTIDLEELEREGLGFAHTVVSQQKVPEVKDIPSAEMVKQSASVVMIKKPLYVWHAATGVVVAASVAAFAFWYGRRRRRW

SEQ ID NO: 8749 - DNA, 1305 bp, Arabidopsis thaliana
  CDS (1)..(1305)
atggcggagaagagctttaagtacatcatcctcggcggcggcgtctctgccggatacgcagctaaggagtttgccaatcaaggggttcaaccaggagaattggctgttatctcgaaagaggcggtggctccatatgaacgccctgcacttagcaaggggtatttgtttcctgaaggggctgctagacttccaggtttccattgctgtgttggtagtggtggagaaaaactgcttcctgaatcctacaagcagaaaggaattgagttgatactaagcacagaaatagtgaaagctgatctctctgccaagagtcttgtcagtgcaactggggatgtcttcaagtatcagacgctcataattgcaactggttctactgttctcagattgactgattttggagtaaaaggtgcagactctaagaatatcctctatctgagagagattgatgatgccgacaaattggttgaagcaattaaagctaagaaaggtggaaaggctgtagttgttggcggaggttacattggtcttgagcttagtgcagttttaaggatcaacaatttagatgtcactatggttttccctgaaccttggtgcatgcctaggcttttcaccgccgatattgctgctttctatgagacttactatacaaacaagggagtgaagatcattaaaggaacagtggcatctgggttcacagctcagccaaatggagaggtgaaggaagtacaactcaaggatgggaggacattggaagccgacattgtgatagttggggttggtgcaaaaccattgacatccttattcaagggacaggtcgaggaagataaaggtggaattaagaccgatgcattcttcaaaacaagtgttccagatgtttacgctgttggtgacgttgctactttccctttgaaaatgtacggagacgtgagaagggtcgagcatgttgaccattcccgcaaatcagcagagcaagctgttaaggcgatcaaagcggctgagggaggcgcagcggtggaggaatacgactatcttccattcttctactctcgctcctttgatctctcatggcagttctacggagacaacgtaggagactctgtgttatttggagacagcaatccatcaaacccaaaaccaagatttggagcatattgggttcaaggtggtaaagtggttggagcattcatggagggaggtagtggtgatgagaacaaagccttggctaaagtcgccaaagctcgaccttctgcagagagtctcgacgagctcgtgaaacaaggaatttccttcgcagctaagatctga

SEQ ID NO: 8750 - protein, 434 aa, Arabidopsis thaliana
MAEKSFKYIILGGGVSAGYAAKEFANQGVQPGELAVISKEAVAPYERPALSKGYLFPEGAARLPGFHCCVGSGGEKLLPESYKQKGIELILSTEIVKADLSAKSLVSATGDVFKYQTLIIATGSTVLRLTDFGVKGADSKNILYLREIDDADKLVEAIKAKKGGKAVVVGGGYIGLELSAVLRINNLDVTMVFPEPWCMPRLFTADIAAFYETYYTNKGVKIIKGTVASGFTAQPNGEVKEVQLKDGRTLEADIVIVGVGAKPLTSLFKGQVEEDKGGIKTDAFFKTSVPDVYAVGDVATFPLKMYGDVRRVEHVDHSRKSAEQAVKAIKAAEGGAAVEEYDYLPFFYSRSFDLSWQFYGDNVGDSVLFGDSNPSNPKPRFGAYWVQGGKVVGAFMEGGSGDENKALAKVAKARPSAESLDELVKQGISFAAKI

SEQ ID NO: 8751 - DNA, 1326 bp, Arabidopsis thaliana
  CDS (1)..(1326)
atggcggaagagaaaagctacaagtacgtgatcattggaggtggtgtagccggcggttacgcggcgagagagtttagtaatcagggcctgaagcctggtgaactcgcaatcatttccaaggaaccagtgcctccttttgagcgtcctgaactaaccaaggtatatattgacctcgaagtcaatccgacccttgcaaatatctatgtttgtgctggaactggagaagcgaagcagtaccctaactggtacaaagagaaagggattgatctaattgtgggcacagagatagtcaaagcagatcttgcttcaaagacacttgttagtgatgatggcaaaatttacaagtaccaaactttgctaattgcaaccggttctactaacataagattgtcagaaattggcgtccaagaagcagatgttaagaatatattctacctaagagaaatcgaggatagtgatgagcttgccttggctatggaactatatgtgcaaaggggaaaggccgtcatcattggcggcggtttcttagggcttgagataagttctgctctaagggctaataatcatgaagtgaccatggtttttccagaaccttggcttgtacaccggtttttcaccgctgagatagcttcattctatgagagttactatgccaacaagggaatcaaaatcatcaagggaactgtagcaactggatttagcaccaactcagatggagaggtcactgaggtgaaactagaggatggaagaaccctagaagctaacatagttgtcgctggtgtcggtgctagaccggccacctcactcttcaaaggccaacttgaagaggagaagggtggaataaagactgatgggttcttcaaaacaagtgtgcctgatgtatacgcacttggagatgtagccacattcccaatgaaaatgtatggcgggacgaggcgtgttgaacacgccgacaatgctcgcaaatctgctgcacaagcagtcaaagcaatcaaagcgggtgaagaagggaaaacgatcccagattacgattatcttccctatttctactctcgatttttcaaactatcgtgggaattctatggggaaaacgttggagaatctgtactgtttggagataatgacccgaaatctccaaagccaaagtttgggacgtattgggttaaagatgggaaagtagtaggagtgttcctagaaggaggtactcaagaggaacacaaggctattgctaaagtggcacgagcacaaccttccgttgagagtcttgacgtgttatccgaggaaggcctttctttcgccaccaagttctatagcacctctctttga

SEQ ID NO: 8752 - protein, 441 aa, Arabidopsis thaliana
MAEEKSYKYVIIGGGVAGGYAAREFSNQGLKPGELAIISKEPVPPFERPELTKVYIDLEVNPTLANIYVCAGTGEAKQYPNWYKEKGIDLIVGTEIVKADLASKTLVSDDGKIYKYQTLLIATGSTNIRLSEIGVQEADVKNIFYLREIEDSDELALAMELYVQRGKAVIIGGGFLGLEISSALRANNHEVTMVFPEPWLVHRFFTAEIASFYESYYANKGIKIIKGTVATGFSTNSDGEVTEVKLEDGRTLEANIVVAGVGARPATSLFKGQLEEEKGGIKTDGFFKTSVPDVYALGDVATFPMKMYGGTRRVEHADNARKSAAQAVKAIKAGEEGKTIPDYDYLPYFYSRFFKLSWEFYGENVGESVLFGDNDPKSPKPKFGTYWVKDGKVVGVFLEGGTQEEHKAIAKVARAQPSVESLDVLSEEGLSFATKFYSTSL

SEQ ID NO: 8753 - DNA, 1308 bp, Arabidopsis thaliana
  CDS (1)..(1308)
atggcagaagaaaagagcttcaagtatgtgatcgtcggaggtggtgtcgccgccggatacgcggcgagagagttcttcaaccaaggtgtcaagcctggtgaacttgctatcatttccagggaacaagttcctccatatgagcgtcctgcacttagcaagggatatatccacctcgaaaataaagctacacttccgaatttctatgttgctgctggaattgggggagagagacagttccctcaatggtacaaagagaaaggtattgagctgattttgggcacagagattgtcaaagcagatcttgctgcgaagacacttgtcagtgggactggacaagtcttcaagtaccaaactttgctagctgcaactggttcttctgtcataaggttgtcagattttggcgtcccaggtgcagatgctaagaatatattctacctgagagaactcgaagatgctgattaccttgcttatgcaatggaaacaaaggaaaaaggaaaggctgtggttgttggtggcggttacatcggtcttgaactcggtgctgctctgaaggctaacaacctcgacgttaccatggtttatccagaaccttggtgcatgcctcggcttttcaccgctggcattgcttccttctacgagggttactatgccaacaaaggaattaacattgtcaaaggcactgttgcatctggtttcactaccaactcaaatggagaggtcactgaggtgaaattgaaagacggaagaacgttagaagctgatattgtgatagtgggtgtcggtggtagaccaattatatcactcttcaaagatcaagttgaagaagagaagggtggtttgaagactgatgggttcttcaaaacaagccttccagatgtatacgccattggtgatgtagccaccttcccaatgaaactctacaatgaaatgagacgcgttgaacacgttgaccatgctcgcaaatccgctgaacaagccgtaaaggcaatcaaggcggctgaggaagggaactcaattccggaatatgactatcttccatacttttactctcgagcctttgatctctcatggcaattctacggtgacaacgttggagaaagcgtattgtttggggacaatgacccggaatcgccaaagccgaaattcgggagctactggattaaagaacggaaagtggttggagcatttttagaaggtggaagtcctgaagagaacaatgcaattgctaaacttgcacgagcacaaccttctgttgagagccttgaagtgctatctaaggaaggcctttccttcgccacaaatatataa

SEQ ID NO: 8754 - protein, 435 aa, Arabidopsis thaliana
MAEEKSFKYVIVGGGVAAGYAAREFFNQGVKPGELAIISREQVPPYERPALSKGYIHLENKATLPNFYVAAGIGGERQFPQWYKEKGIELILGTEIVKADLAAKTLVSGTGQVFKYQTLLAATGSSVIRLSDFGVPGADAKNIFYLRELEDADYLAYAMETKEKGKAVVVGGGYIGLELGAALKANNLDVTMVYPEPWCMPRLFTAGIASFYEGYYANKGINIVKGTVASGFTTNSNGEVTEVKLKDGRTLEADIVIVGVGGRPIISLFKDQVEEEKGGLKTDGFFKTSLPDVYAIGDVATFPMKLYNEMRRVEHVDHARKSAEQAVKAIKAAEEGNSIPEYDYLPYFYSRAFDLSWQFYGDNVGESVLFGDNDPESPKPKFGSYWIKERKVVGAFLEGGSPEENNAIAKLARAQPSVESLEVLSKEGLSFATNI

SEQ ID NO: 8755 - DNA, 1251 bp, Arabidopsis thaliana
  CDS (1)..(1251)
atggcgttagcatcaaccacgttgccgacgaagtccggattatctctttggtgtccgtcttctccgtctctcgctcgccgatttcccgctcgtttttctccgatcggttctagaatcgcttccagaagcctcgtcactgcttcgttcgctaacgagaatcgcgagtttgtgattgttggtggaggaaatgctgctggttatgctgctagaacttttgtggaaaatggaatggctgatggtcggctatgcattgtgaccaaagaggcttacgcaccttatgagagaccggctttgacaaaagcttacttgttcccaccagagaagaagccagctcgtttaccaggatttcatacttgcgttggaggtggtggagaaaggcaaacaccagattggtataaggagaaaggaattgaggtaatatatgaagatccagtggctggagctgattttgaaaagcaaacactcaccacagacgcagggaagcagttaaaatatggatctctaattatcgctacagggtgtacagcctcaaggttcccagataaaatcggtgggcacttgccaggggttcactatattcgggaggttgcagatgctgattcactgatagcatctctgggaaaggcaaagaaaattgtcattgttggtggtggctacatcggcatggaggttgctgctgcagctgttgcgtggaatctagatacaacgattgtattccctgaagatcagcttttgcaaagattgttcactccatcgcttgctcagaaatatgaagaactgtaccgtcaaaatggtgttaagtttgtcaagggcgcttccataaataacttggaagcaggttcggatgggcgtgtatcagctgttaagcttgctgatgggtctacaattgaggcagacacggttgtaattggaattggagctaagcctgctattggcccctttgaaactttggccatgaacaaatcaattggaggaattcaggtcgatggcttgttcaggacaagtacccctggaatttttgctattggagatgtcgcagccttccctttgaagatatatgataggatgactcgagttgaacatgttgatcacgcccgccgctctgcacaacactgtgtgaaatcactactcacggcacacactgacacgtacgattatcttccatatttctactcaagagtattcgagtatgaaggaagcccaagaaaagtgtggtggcagtttttcggagataatggtaaatctatttga

SEQ ID NO: 8756 - protein, 416 aa, Arabidopsis thaliana
MALASTTLPTKSGLSLWCPSSPSLARRFPARFSPIGSRIASRSLVTASFANENREFVIVGGGNAAGYAARTFVENGMADGRLCIVTKEAYAPYERPALTKAYLFPPEKKPARLPGFHTCVGGGGERQTPDWYKEKGIEVIYEDPVAGADFEKQTLTTDAGKQLKYGSLIIATGCTASRFPDKIGGHLPGVHYIREVADADSLIASLGKAKKIVIVGGGYIGMEVAAAAVAWNLDTTIVFPEDQLLQRLFTPSLAQKYEELYRQNGVKFVKGASINNLEAGSDGRVSAVKLADGSTIEADTVVIGIGAKPAIGPFETLAMNKSIGGIQVDGLFRTSTPGIFAIGDVAAFPLKIYDRMTRVEHVDHARRSAQHCVKSLLTAHTDTYDYLPYFYSRVFEYEGSPRKVWWQFFGDNGKSI

SEQ ID NO: 8757 - DNA, 1371 bp, Ostreococcus lucimarinus CCE9901
  CDS (1)..(1371)
atgagcaaaccgacgacgtcccgctcgccgcgccccgcacacgccgcctccgaccggtcctccatgtctcgctccatcgtcgtcgtcggcggtggtaacgccgcgggctatctcgtccgcgcgttggtgagcgccgatccgaccctgggcgcgcgaacgctcgtcatcggtgccgaggacgtcgcgccgtacgagcgtcccgcgctcaccaaaggattcctgcacaaagaaagcccgccgcgtctgcccggtttccacacctgcgtcggcggcggcggcgagcgacaaacgccagagtggtacgaacagcacggggtggaactgaggctgaacacgacggtgacggcggcggatttcaagagccgtacggtgacgacgagcgcgggcgagtcgatcggctacgaaacgttggtcctcgccacgggatgcggcgtcattcggcttcccgaagccatcggggggacgttaccgggagttcactacgtgcggaacaacgccgatggactcgcgctcgtggaagcgatggacaaggcgacgaaggcggttgtcgtcggcggcgggtacgtcggtttggaagtcgcggcgtcgtgcgccacgcgcggattgaagccggaggtggtgatgatggagccgcacgtcatggcgaggctttggaacgccgatatcgcgcagcattacgagcgattgtacgaaactcggggtacgacgtttcacaggtcgagtaagctcaaggcaattttggccgacgccgacggcaaggcgcgcgggattgaattagagtctggcgcggtgatcgacgccgatttagtcgtcgtgggcgtcggcgcgaccgcgcccgtgcctttcaccggactggacgcccccgaaggacgcgtgggtgggatcaaggtggactcgcgattccgcgcttctggcgcggacgtcgcgcccggtagcgtgtacgccatcggcgacatcgcggcgttcccactcaagctcgccgacaacgagatcgtccgcatggaacacgtcaagcacgcgcgcgacagcgccaccttggtcggtaacatcatcgccggcaaatccgacgacgagtacgattacacgcccttcttttacagtcgcgtcttcgagcatcccggcaccgagcgcgccgtcaactgggtcttccacggcttacagcgcggtgaaatcatcaccataggcaatctcgaccccacgctcgccgcgttctggattgacgacggcaagtgcgtcggcatcatgctcgaatccggcgcccccgagcgcgtcgccgcgctcgccgccgctgttcgcgcccgcaaatccgtcgacgtctccgcgctccgcgcgtgcgcttccgtcgacgacgccctcgcgttggtcctttaa

SEQ ID NO: 8758 - protein, 456 aa, Ostreococcus lucimarinus CCE9901
MSKPTTSRSPRPAHAASDRSSMSRSIVVVGGGNAAGYLVRALVSADPTLGARTLVIGAEDVAPYERPALTKGFLHKESPPRLPGFHTCVGGGGERQTPEWYEQHGVELRLNTTVTAADFKSRTVTTSAGESIGYETLVLATGCGVIRLPEAIGGTLPGVHYVRNNADGLALVEAMDKATKAVVVGGGYVGLEVAASCATRGLKPEVVMMEPHVMARLWNADIAQHYERLYETRGTTFHRSSKLKAILADADGKARGIELESGAVIDADLVVVGVGATAPVPFTGLDAPEGRVGGIKVDSRFRASGADVAPGSVYAIGDIAAFPLKLADNEIVRMEHVKHARDSATLVGNIIAGKSDDEYDYTPFFYSRVFEHPGTERAVNWVFHGLQRGEIITIGNLDPTLAAFWIDDGKCVGIMLESGAPERVAALAAAVRARKSVDVSALRACASVDDALALVL

SEQ ID NO: 8759 - DNA, 1308 bp, Chlamydomonas reinhardtii
  CDS (1)..(1308)
atgcccgccacctacaagactgttatcctaggcggaggcaatgcctctggctacgccgcgaaggcgttcgtagaggcgggcatcgagaaagactcgctagcgattatcaccgaggagccgttcgtcgcttatgagcggccggcgctctccaagggctacctgctgggcgccgcccggctgcctggcttccacacctgcgtgggtggcggcggcgagcgccaggcgcccgagtggtacgctgagaagggcatcacctacctgaccaactcgcgtgtgacgaaggccgacctggcgtcccgcacgctgatactggcctccggcgacaccgtcagctacagccagagcctcatcattgccaccggggcccgggccgtcaagctgacggagtttggtgtgccgggcgccgacctgtccggcatccactacctgcgcgacgtcaaggacgccgagtcgctggtggcagctgtggcggcggccaaggaggccagcggcaaggctgtcattgtgggcggcggctacatcggcatggagtgcgccgccgggctggcctccacgggtctggcgggcgccaccaccatcgtcatgcccgaggaccgcctcatggcgcgactgctcacgccgcagctggctgctgtgtatgagcggctgtacggcgacaagggcgtgaccatggtgaagggagccaaggtcacagccttcaccggcacggacggcaaggtgcggcggcggcccctggatgcctcgctggtggtggtgggcgtgggggcgcgcgccaactccgacctattcaccggccagctggagatggctgcgggcggcatcaaggtcgaccgcatgatggccaccagtgtgccgggtgtgtacgctgtgggcgacgtggcggcgttcccgctgaccagcgtggccaccggccaggagtcgcacgtgcgccaggagcacgtcacgcactgccggtcgagcgcggcccaggcagtcaaggccatcaccagcacctccgcgccgccgcccgcctacgagtacctgcctttcttctacagccgcgtgttcaacttgtcctgggtgttctacggcgaggccgccgcggacgccacgccggtgcacttcggtgacctgaacgaggccaaggtgtttggctgcctgtggctgggcgcgggcgggcggctggtgggcgccttcctggagggcggcagcggcgaggaggcggccgtgctcaagtcggcggtggcggcgggcgtcaaggggctggacgcggggctggacacggccagcggcagcggcaccgtggcggccatcaaggccaagctgtga

SEQ ID NO: 8760 - protein, 435 aa, Chlamydomonas reinhardtii
MPATYKTVILGGGNASGYAAKAFVEAGIEKDSLAIITEEPFVAYERPALSKGYLLGAARLPGFHTCVGGGGERQAPEWYAEKGITYLTNSRVTKADLASRTLILASGDTVSYSQSLIIATGARAVKLTEFGVPGADLSGIHYLRDVKDAESLVAAVAAAKEASGKAVIVGGGYIGMECAAGLASTGLAGATTIVMPEDRLMARLLTPQLAAVYERLYGDKGVTMVKGAKVTAFTGTDGKVRRRPLDASLVVVGVGARANSDLFTGQLEMAAGGIKVDRMMATSVPGVYAVGDVAAFPLTSVATGQESHVRQEHVTHCRSSAAQAVKAITSTSAPPPAYEYLPFFYSRVFNLSWVFYGEAAADATPVHFGDLNEAKVFGCLWLGAGGRLVGAFLEGGSGEEAAVLKSAVAAGVKGLDAGLDTASGSGTVAAIKAKL

SEQ ID NO: 8761 - DNA, 1305 bp, Physcomitrella patens subsp. patens
  CDS (1)..(1305)
atggctgctatattgcgcaagtacattgtggtgggaggaggtgtagctggaggctacgctgcacgagagtttgtaaaactgggattacaacctggggaactgaccattttctccaaagaagcggcggcaccttatgagcggcctgctctgagcaaagcttacttgttccctgatgctcctgctaggcttccaggctttcatgtgtgcgtggggagtggaggagagaagcaattaccggattggtatgctgaaaaaggtattgaacttaaattggagactgagatcgtgaaagcggacgtggagaataagaccttgacaactaataagggcgatatttacgagtatgggactctgattcttgcaacaggctccacgttccttaaccttgccgacttcaaaactcctggagctgacgccaaaggtatttattacctaagagatattggtgatgctgataaaattgttgaagccatcaaagctagcaagggagatgaagcagtggttgtaggtggaggttacattgggctggaattagctgcatgtctgacgatgaacaagattaaagtcaacatggtgttcccagaaccatgcttgatgcctcgtttgtttacacccgaacttgcctcattttacgagagatactatgagggtaaaggcgtaaacatcatcaagggaacaactgtaactgcatttgagaaagatgacaatggccacgtatctaaagtcttattgaaaaacggaagctctgtgaacagcacttttgtggtggtgggagttggcgcaaggccacttctggctcctctgaagggtttgatagaagaagagaagggtggtttcaaggttgatgcttcattcaaaacaagcaaccccaatgtgtacgccgtaggtgacattgcaacattcccaatgaagatgtatggtgatagccggcgagtggagcatgtggaccatgcaaggaaatctgccatgcaggctgttcaggcgatcaaagccgctgagaagggcgaagtcgtggacgagtacgattacctcccattcttctactcccgctccttcaatctgtcgtggcagttctacggcgacaatgtgggcgagactgtgctttggggccgtaacggggctgcagcctctgagtccaagtttggtgcttactgggtcaaggacaacaaggtgatgggggcatttttggagggcggatcacctgatgagaacaagttgattgccaaagttgcacgagagcagcctactgtgaattcaactgatgagttagtgtctggtggcctaggctttgcatccaagatataa

SEQ ID NO: 8762 - protein, 434 aa, Physcomitrella patens subsp. patens
MAAILRKYIVVGGGVAGGYAAREFVKLGLQPGELTIFSKEAAAPYERPALSKAYLFPDAPARLPGFHVCVGSGGEKQLPDWYAEKGIELKLETEIVKADVENKTLTTNKGDIYEYGTLILATGSTFLNLADFKTPGADAKGIYYLRDIGDADKIVEAIKASKGDEAVVVGGGYIGLELAACLTMNKIKVNMVFPEPCLMPRLFTPELASFYERYYEGKGVNIIKGTTVTAFEKDDNGHVSKVLLKNGSSVNSTFVVVGVGARPLLAPLKGLIEEEKGGFKVDASFKTSNPNVYAVGDIATFPMKMYGDSRRVEHVDHARKSAMQAVQAIKAAEKGEVVDEYDYLPFFYSRSFNLSWQFYGDNVGETVLWGRNGAAASESKFGAYWVKDNKVMGAFLEGGSPDENKLIAKVAREQPTVNSTDELVSGGLGFASKI

SEQ ID NO: 8763 - DNA, 1302 bp, Physcomitrella patens subsp. patens
  CDS (1)..(1302)
atggctacaattgatcgcaaatacattgtggtgggaggaggtgtagccgggggctacgctgcacgagagtttgtcaaattgggcttgcaacctggagaattgaccattttctccaaagaagcggcggcaccttatgagcgacccgccttgagcaaagcttacatgttccctgaggctgctgctaggcttccaggcttccatgtctgtgtaggaagcggtggagagagacagttaccggactggtatgccgaaaaaggtattgaactgaaactggagtctgagattgtgaaggccgacctagagaacaagactctgacgacagataagggagatgtctacagttatggaactctggttattgccacaggctctacgttccttaaccttgctgacttcaaaactgctggagccgacgctaaaggtatttactacctgagagaggtgcatgaagctgataagcttgttgacgccattaaagccaacaagggaggtgaagcagtggttgtcggtggaggttacattgggctggaattagctgcatgcctgacaatcaataagattaaagtcacaatggtgttcccagacccatgcttcatgcctcgtttgtttacacccgagcttgcctccttctatgagggttattacgagaataagggtgtgaacatcatcaagggaacgtctgtgactgcttttgagaaagatgataatggccatgtatcgaaagtaattctgaaagatggaagaacgttggacagcactctcgtggttgtgggagttggtgcaaaaccacttttgggtccttttaagggtttgttggaggaggagaagggtggtattaaggttgatgcctcattcaagacaagtgaccccaacgtgtacgctgtaggtgatattgcgacgttcccaatgaagatgtacggcgacactcggcgagtggagcatgtggatcatgcaaggaagtcggccatgcaggctgtgcaggctatcaaagctgcagagaagggcgaagtcgtggacgagtacgattacctgcctttcttctactctcgctccttcgatctgtcgtggcagttttatggcgacaatgtgggtgaaactgtgcattggggccgagaggctggaacacctgactcaaagtttggtgcttactgggttaaggacaacagggtaatgggcgcctttttggagggtggttcacctgatgaaaacaagttaattgccaaagttgcccgagaacaaccgtctgtgaattctacacaggatttagtatctgctggattaggcttcgcatccaaggtataa

SEQ ID NO: 8764 - protein, 433 aa, Physcomitrella patens subsp. patens
MATIDRKYIVVGGGVAGGYAAREFVKLGLQPGELTIFSKEAAAPYERPALSKAYMFPEAAARLPGFHVCVGSGGERQLPDWYAEKGIELKLESEIVKADLENKTLTTDKGDVYSYGTLVIATGSTFLNLADFKTAGADAKGIYYLREVHEADKLVDAIKANKGGEAVVVGGGYIGLELAACLTINKIKVTMVFPDPCFMPRLFTPELASFYEGYYENKGVNIIKGTSVTAFEKDDNGHVSKVILKDGRTLDSTLVVVGVGAKPLLGPFKGLLEEEKGGIKVDASFKTSDPNVYAVGDIATFPMKMYGDTRRVEHVDHARKSAMQAVQAIKAAEKGEVVDEYDYLPFFYSRSFDLSWQFYGDNVGETVHWGREAGTPDSKFGAYWVKDNRVMGAFLEGGSPDENKLIAKVAREQPSVNSTQDLVSAGLGFASKV

SEQ ID NO: 8765 - DNA, 1305 bp, Physcomitrella patens subsp. patens
  CDS (1)..(1305)
atggacgcagctatgctgaagtacgtgctagtaggcggaggtgttgcagggggatacgcagcgcgggaatttgtaaagttgggtgtgaatcctggagagcttgcaattttctccaaagaaccggttgcgccctatgaacggcccgccttgagcaaggcatacttgtttcctgaatcgcctgcaaggctccctggtttccacacatgtgttggcagtggtggagagaggcaagcaccggagtggtatgctgataatggcattgatcttcacttgagctccgagattgctaaggcagacacaaagagcaagaccattacaactgcgcaagggaaaacttttgaatatggttcacttttgattgcaactggctctacatttattaacctggccgacttcaagactcctggagctgatgctggaggtattcactatctgagagaaaaagatgatgccgataagctggtggaagagattggagccaacaaaggaggcgaagctgtggttgtcggaggaggctacatcggtgtggaattggctgcgtgtcttgccctcaactcaatcagggtgactatggtgttccctgacccacatttcatgcctcgcttgtttacaccggaaatagcttcgttctacgaaagctattacaaggcaaagggtatcaacatcatcaaaggaacatccgtgactgcgtttgagaaagatgatcagggcaatgtggtgaaggtaatcctgggagatggccggtcgttgtcaaccaaccttgtagtagtgggtattggtgccagacctaacctaggaccattcaaaggcttgctggaggaagaaaaaggtggcttcaaggtggattcttctttcagatcaagcgcggaagacgtgtatgcagtcggtgatattgcaacattcccattaaagatgtatggtgacaggcgacgtgtcgagcacgtggaccatgcccggaaatcagctatccaagctgttcaggccatcaaagccgctgagaaaggcgaaactgtggacgactacgactacctgcccttcttttactcacgatctttcgacctctcatggcaattctatggagacaatactggtgattctgtcgtctggggtctagatggagcaagcgcttcaggctccaaattcggcgcctactggataaacgatggcaaagtagtgggtgcatttttggagggtgggtctcctgatgaaaacaagcttcttgccagagttgcacgacagaggccctcagtgagcagcaagaaggatctgatctctggcggcttggattttgccgcgaagatttag

SEQ ID NO: 8766 - protein, 434 aa, Physcomitrella patens subsp. patens
MDAAMLKYVLVGGGVAGGYAAREFVKLGVNPGELAIFSKEPVAPYERPALSKAYLFPESPARLPGFHTCVGSGGERQAPEWYADNGIDLHLSSEIAKADTKSKTITTAQGKTFEYGSLLIATGSTFINLADFKTPGADAGGIHYLREKDDADKLVEEIGANKGGEAVVVGGGYIGVELAACLALNSIRVTMVFPDPHFMPRLFTPEIASFYESYYKAKGINIIKGTSVTAFEKDDQGNVVKVILGDGRSLSTNLVVVGIGARPNLGPFKGLLEEEKGGFKVDSSFRSSAEDVYAVGDIATFPLKMYGDRRRVEHVDHARKSAIQAVQAIKAAEKGETVDDYDYLPFFYSRSFDLSWQFYGDNTGDSVVWGLDGASASGSKFGAYWINDGKVVGAFLEGGSPDENKLLARVARQRPSVSSKKDLISGGLDFAAKI

SEQ ID NO: 8767 - DNA, 1461 bp, Physcomitrella patens subsp. patens
  CDS (1)..(1461)
atggggcgatcgttcagggtggtgatcctcgggggcggaacggcgagcggatacgcagcgtcggagttcgtgaagcatgggttgaatcccggggatttgtgtgttatctcgcaagaaatggttgcaccatatgagcgccctgctttgagtaagggatacttgttagccaaagaacctgcgcggttacctgcttttcatacgtgtgtgggtgtgggggagcaatcgcatcctgctaaatggtttcaagaaaaagggatcgagttggttttgggaactcgcgttacacaagcaaatgttagagataaaactcttttgactgctgcgggtgaaaccatttcgtactccatcctgattgttgcaacgggcgctcgggttctgaagctggatgagtttggggtcacgggagcagatgcaaagaacgtttgctaccttcgagacatcaaagatgcgacgtatctcgtggatgcgatggcagagtgtcgggagaaaggcgggaaggctgttgtgattggcggtggctacattgggatggagtgtgccgcagccctccacgggaatcgtattcctgtgaccatggtgttcccggaagattactgcatgcctcgcttatttacaccagagattgcaagatattatgaagattactacatgaagaagggtatacagtttcgaaaagggaacgtcctgtcttcatttgagtgcgacgaatcggacaaggtgactgcagtcatactgaaagacggaagtcgaatagacgcagacattgtggttgtgggcatcggtatacgccccaacgtggacctttttgaagggcagctcatgctggagaaagggggcatcaaagtgaatggcaaaatgcaaagtgtgagcaatgcgtccgtgtatgcagtgggagacgtggcgacctttcccatgccgatgtacagcgatgtgaggaggctggagcatgtggatcacgctcgcaagtctgcagctcacgctgtgcaggccatcctgatggggaacaaagtggacaattacgactaccttccttacttctactcccgggtcttcacgctgtcgtggcaattctacggcgacaacgtgggtgatagtgtgctattcggtgaccaaattgtaggcaagttcggggctttctgggtgcacaatgggagattggtaggggcgtttctggagggagggtccaaggtagagtatgcggcactagccaaggcagccagagaacggccacatgtaaaggatattagtatgttaaagaaacaaggtcttgattttgcactgacggtagcggagcctactccacagatgtcattgatgagttctatcacctcgtccgagagcaacctcttgttcacccacccttcgacgtgggcgcttcaagcaggtggtggcttagccctaggattggccgttgttggggttatatactggtttggcagcaggagatccagaaaactgtga

SEQ ID NO: 8768 - protein, 486 aa, Physcomitrella patens subsp. patens
MGRSFRVVILGGGTASGYAASEFVKHGLNPGDLCVISQEMVAPYERPALSKGYLLAKEPARLPAFHTCVGVGEQSHPAKWFQEKGIELVLGTRVTQANVRDKTLLTAAGETISYSILIVATGARVLKLDEFGVTGADAKNVCYLRDIKDATYLVDAMAECREKGGKAVVIGGGYIGMECAAALHGNRIPVTMVFPEDYCMPRLFTPEIARYYEDYYMKKGIQFRKGNVLSSFECDESDKVTAVILKDGSRIDADIVVVGIGIRPNVDLFEGQLMLEKGGIKVNGKMQSVSNASVYAVGDVATFPMPMYSDVRRLEHVDHARKSAAHAVQAILMGNKVDNYDYLPYFYSRVFTLSWQFYGDNVGDSVLFGDQIVGKFGAFWVHNGRLVGAFLEGGSKVEYAALAKAARERPHVKDISMLKKQGLDFALTVAEPTPQMSLMSSITSSESNLLFTHPSTWALQAGGGLALGLAVVGVIYWFGSRRSRKL

SEQ ID NO: 8769 - DNA, 1437 bp, Vitis vinifera
  CDS (1)..(1437)
atgggaagagcaattacgtatgtgattcttggtggaggcgtagcagctgggtatgcagctcttgaattcacgaagagaggcatttctcatggtgaactctgcataatctctgaagaaccagttgtgccatatgagagacctgcattaagcaaaggttttttgcttccagaagctccttcacgcctaccatcatttcacacttgtgttggtgctaatgaggagagattaactccaaaatggtataaggaacatggaattgaactggtccttggtactcgagtcaaatctgctgatgtgaggcggaagacgctactaacagcaactggagaaacaataagttacaagattctcatcattgcaacaggtgctcgggcattgcagcttgaagaatttggagtggctggatcagatgctgaaaatgtgtgttatttacgtgacttggctgatgccaccaggcttgttgatgtcatgaaatcttgtactggtgggaatgctgttgtgattggcggtgggtacataggcatggagtgtgctgcatctttggtgataaataaaataaatgttacaatggtcttcccagaagcacattgcatggcccgtttgttcacaccaaagattgcgagttattatgaagattattacaagtctaaaggagtaaagttcattaaaggaacggccttgtcatcatttgatatcgacgactctggaaaggtcacagcagttactctcagggatgggaatcggctccctgcagacatggttgtggtgggaatcggaatccgcccaaatacaggcctgtttgagggccaactaactttggaaaagggtgggatcaaagtgaatggatggatgcagtcaagtaatagctcagtctatgctgttggagatgttgcagcatttcctgtcaaactctttggagaaacccgcagacttgagcatgttgactcagcccgaaagtcagcaagacatgctgttactgcaataatggaaccagccaagacaagtgaattcgactacctaccattcttctactccagggtcttcacgctgtcttggcagttctatggggactctgtaggggaagtggttcattatggggatttctctggaagcacttttggtgcttactgggtgagtaaaggccaacttgttgggtctttccttgaaggtggaacgaaagaggagtatgaggccatagccaaggctaccaagctgaagccagatgttgaagacttagctgagctggaaagacaaggtctgggttttgcattggcagtcagtcggaaaccaccaccatcacagcctcctgaggtgagcagctctggcctcaatcttcaaaaaccaatgtatgcttggcatgcaacagcaggggtgattgtggctgcctccgtagctgtatttgcatattggtacggaaggaaacgccgaagatggtaa

SEQ ID NO: 8770 - protein, 478 aa, Vitis vinifera
MGRAITYVILGGGVAAGYAALEFTKRGISHGELCIISEEPVVPYERPALSKGFLLPEAPSRLPSFHTCVGANEERLTPKWYKEHGIELVLGTRVKSADVRRKTLLTATGETISYKILIIATGARALQLEEFGVAGSDAENVCYLRDLADATRLVDVMKSCTGGNAVVIGGGYIGMECAASLVINKINVTMVFPEAHCMARLFTPKIASYYEDYYKSKGVKFIKGTALSSFDIDDSGKVTAVTLRDGNRLPADMVVVGIGIRPNTGLFEGQLTLEKGGIKVNGWMQSSNSSVYAVGDVAAFPVKLFGETRRLEHVDSARKSARHAVTAIMEPAKTSEFDYLPFFYSRVFTLSWQFYGDSVGEVVHYGDFSGSTFGAYWVSKGQLVGSFLEGGTKEEYEAIAKATKLKPDVEDLAELERQGLGFALAVSRKPPPSQPPEVSSSGLNLQKPMYAWHATAGVIVAASVAVFAYWYGRKRRRW

SEQ ID NO: 8771 - DNA, 1473 bp, Vitis vinifera
  CDS (1)..(1473)
atggctagtatttcaaactcgttgccgctgaagcatggaatctctctctggtgtcctcaacatgcttctctgaatcggacccgccttccttcttcattcggatcatcagcctcagccagacgttacggcgtcgtttcgtgtgctttcgctaacgaaaatcgagagtttgttatcgtcggcggtggaaatgccgctgggtatgcagcacggacttttgttgaacacggtatggctgatggaaagctctgcattgtatctaaagaggcatttgcgccatacgagcgtcctgctttgacaaaaggctatctgttccctctggacaaaaagccagcacgattacctggttttcatacttgtgttggatcgggtggagagagacagacccctgattggtataaagagaaagggatagagatgttatatgaagatccagtaacaggtattgatattgaaaaacaaaccctgatgacaaattcaggcaaactcctcaagtatggatcccttataattgctacaggttgtacggcatcaagacttccagataaaataggaggaaacttacctggtgttcattacatccgggatgttgcagatgctgattcattgatatcatcattggagaaggcacggaaagttgttattgttggtggtggttacattggtatggaggttgctgcagcggctgcaggttggaaacttgataccacgattatatttccagaggatcatcttttgcaaagattgtttactcctacacttgcacggagatatgaagagttttatcaggagaatggtgtcaaatttgtgaagggagcctctatcaaaaacatagaagctggttctgatggacatgtaactgctgtaaaacttgaaaatggatccaccatagaagcagacacgattattattggtattggagcaaaacctgctgttagtccatttgaaagggtgggcataaataccactgtgggtggaatacaggttgatggtcagttccgaacaagtgtacctggaatctttgcaattggagatgtggctgcattcccattaaagatgtataaccgtattgcacgagttgaacatgttgatcatgctcgtcgctcagcacagcattgtataaatgcattattgactgcaaaaacacatctatacgattatctcccatatttttactcgagggtgtttgagtatgaagggagcccaaggaaaatatggtggcaattttttggggacaatgttggagagacagttgaaatagggaattttgacccgaagattgctactttctggatagattctggtaaactgaaaggggttctccttgaaagtggcagtcctgaggaatttcaactccttccgaagctcgcaaggagccaacctcacgttgatatgaccaagcttcagaaggcatcttcggttgaggaggcactagaattggctcatgcatacgtgcaagctggagctgcagtttag

SEQ ID NO: 8772 - protein, 490 aa, Vitis vinifera
MASISNSLPLKHGISLWCPQHASLNRTRLPSSFGSSASARRYGVVSCAFANENREFVIVGGGNAAGYAARTFVEHGMADGKLCIVSKEAFAPYERPALTKGYLFPLDKKPARLPGFHTCVGSGGERQTPDWYKEKGIEMLYEDPVTGIDIEKQTLMTNSGKLLKYGSLIIATGCTASRLPDKIGGNLPGVHYIRDVADADSLISSLEKARKVVIVGGGYIGMEVAAAAAGWKLDTTIIFPEDHLLQRLFTPTLARRYEEFYQENGVKFVKGASIKNIEAGSDGHVTAVKLENGSTIEADTIIIGIGAKPAVSPFERVGINTTVGGIQVDGQFRTSVPGIFAIGDVAAFPLKMYNRIARVEHVDHARRSAQHCINALLTAKTHLYDYLPYFYSRVFEYEGSPRKIWWQFFGDNVGETVEIGNFDPKIATFWIDSGKLKGVLLESGSPEEFQLLPKLARSQPHVDMTKLQKASSVEEALELAHAYVQAGAAV

SEQ ID NO: 8773 - DNA, 1305 bp, Vitis vinifera
  CDS (1)..(1305)
atggcggagaagcattttaaatacgtgatcctcggcggtggcgtttctgctggatatgcagctagggagtttgccaagcaaggggttaagccaggggaactggcaattatttccaaagaggcggttgctccttatgaacgtcctgcgcttagcaaagcctacctatttcctgagggagctgcaagacttcctggatttcatgtttgtgttggaagcggaggagagagacttcttcctgagtggtataaagagaaaggtatagaattgatccttagtacagaaatagtgaaagcagatcttgcatccaaaactctgataagtgcagctggagaaacctttaagtatcacatcttgattattgcaactggttcaacggtcataaggttaactgactttcgtgtagaaggagctgatgcaaaaaatatcttatacttgagagaaatcaatgatgctgacaagcttatagatgtaataaaggccaaaaagaatggaaaggctgtgattgttggaggggggtacattggtctcgagcttagtgcagtgatgaaaatcaacaacttagatgtttgcatggtttatccagaaccatggtgcatgcctcggcttttcactgctggtatagctgctttttatgagggttattatgctaataaaggaatcaaaattatcaagggaacagtagcagttgggtttacctctgatgcaaatggagaggtaaaggaagtgaaacttaaggatggtagggtgctggaagctgacattgttgttgttggtgttggtggaagaccccttacaacattattcaaaggacaggtggaagaggagaaaggtggaattaagactgatgaattcttcaaaacaagtgttcctgatgtatatgctgtgggagatgttgctactttcccactgaaattgtacaatgaaattagaagagttgaacatgtcgaccatgcccggaaatcagctgagcaagctgtcaaggcaatcaaggcaagtgaggaagggaaatcagttgaggagtatgactaccttccatacttctactctcgtgcctttgatctgtcctggcagttctatggtgacaatgtgggtgaaacagtgctatttggagacaataatccagcatcaccaaaggccaagtttggaacctattggatcaaagatgggaaagtggtgggagcatttctggagggtgggactcctgaagagaacacggctattgccaaagttgcaaggctccaacctgcagttgagaatctggatcaactgactaaggaaggtctcacctttgcctgtaagatttga

SEQ ID NO: 8774 - protein, 434 aa, Vitis vinifera
MAEKHFKYVILGGGVSAGYAAREFAKQGVKPGELAIISKEAVAPYERPALSKAYLFPEGAARLPGFHVCVGSGGERLLPEWYKEKGIELILSTEIVKADLASKTLISAAGETFKYHILIIATGSTVIRLTDFRVEGADAKNILYLREINDADKLIDVIKAKKNGKAVIVGGGYIGLELSAVMKINNLDVCMVYPEPWCMPRLFTAGIAAFYEGYYANKGIKIIKGTVAVGFTSDANGEVKEVKLKDGRVLEADIVVVGVGGRPLTTLFKGQVEEEKGGIKTDEFFKTSVPDVYAVGDVATFPLKLYNEIRRVEHVDHARKSAEQAVKAIKASEEGKSVEEYDYLPYFYSRAFDLSWQFYGDNVGETVLFGDNNPASPKAKFGTYWIKDGKVVGAFLEGGTPEENTAIAKVARLQPAVENLDQLTKEGLTFACKI

SEQ ID NO: 8775 - DNA, 1437 bp, Populus trichocarpa
  CDS (1)..(1437)
atgggaagagcatttgtgtatgttattcttggaggaggagtggcagctgggtatgcagctcttgaattcacaaagaaaggggtctcacctggagaactttgcatcatctctgaagaaactgttccaccttacgagagacctgcattgagcaaaggttatttacttcctgaagctccagcacgccttccatcgtttcacacttgtgttggagctaatgaggaaaggttgactccaaaatggtataaggaacacggaattgaattgattctgggaactcgagttaagtctgttgatgtgaggcgcaagacactactaactgcagttggcgagactataagctacaagattctcattattgcaacaggtgctcgggctttgaagcttgaagaatttggagtgagtggatcagatgcggaaaatgtttgttatttgcgagatttagctgatgcaaacagggttgttgatgtgatgcaatcttgtgcttctgggaatgctgttgttattggtggtggctatataggaatggagtgtgctgcgtctttggtgacaaatcgaattaatgtcactatggttttcccggaagtacattgtatggctcgcttgtttacacccaagattgcaagttattatgagggttattacaattcaaaaggagttcgattcgtaaaaggaactgtcctgtcatctttcgagattgaccccattggaaaggttaccgctgttaatcttcgagatggaagtcagcttcctgctgacatggttgtagtgggcattgggatccgtccaaacacgagcctgtttgaaggccaactgactttggagaaaggtgggatcaaagtaaatggacgaatgcaaacgagcaacacttcggtctatgcggtaggagatgttgctgcatttccagtgaaactatttggtgaaacacgtaggcttgagcatgttgactctgcgcggaaaacagcaaaacatgctgttgcagcgataatggagcctgagaaaacagatgagtttgattacctgccctttttctattccaggttcttcacattttcctggcagttttatggggacaatgcaggggaagtggtgcattttggggattactcggggaatacaattggagcatactggataagtaaaggtcaccttgttggatctttccttgaaggaggaacgaaagaagagtatgaagctctagccaagaccacaagacttaagccagcaatagatgacataactgagctggaaaggcagggtttgggctttgcagtgacagttagtaagaaaccactaacatctccacctgctgatgttagtgattctacccttgttctggagaggccattgtttgcttggcatgcgacagctggtgttatcacggcggcatcaatagctgcgttcgcatattggtatggaaagaggcgccggaggtggtga

SEQ ID NO: 8776 - protein, 478 aa, Populus trichocarpa
MGRAFVYVILGGGVAAGYAALEFTKKGVSPGELCIISEETVPPYERPALSKGYLLPEAPARLPSFHTCVGANEERLTPKWYKEHGIELILGTRVKSVDVRRKTLLTAVGETISYKILIIATGARALKLEEFGVSGSDAENVCYLRDLADANRVVDVMQSCASGNAVVIGGGYIGMECAASLVTNRINVTMVFPEVHCMARLFTPKIASYYEGYYNSKGVRFVKGTVLSSFEIDPIGKVTAVNLRDGSQLPADMVVVGIGIRPNTSLFEGQLTLEKGGIKVNGRMQTSNTSVYAVGDVAAFPVKLFGETRRLEHVDSARKTAKHAVAAIMEPEKTDEFDYLPFFYSRFFTFSWQFYGDNAGEVVHFGDYSGNTIGAYWISKGHLVGSFLEGGTKEEYEALAKTTRLKPAIDDITELERQGLGFAVTVSKKPLTSPPADVSDSTLVLERPLFAWHATAGVITAASIAAFAYWYGKRRRRW

SEQ ID NO: 8777 - DNA, 1494 bp, Populus trichocarpa
  CDS (1)..(1494)
atggcgagcggcagcagtatatcctccaatccgatgtcgtttaagcacggcttatctctctggtgtccacagtcatctcctcttcatcgaactctccagtcttctccttcttcttcaatcggattcaagactttcttccgaaaccacgtcgttgctgcttcctcctcctccttcgctaatgaaaatcgagagtatgtgattgttggtggtggaaatgcagcgggatatgcggcgaggagttttgtggagcatggaatggctgatggaaagctttgtattgttaccagagaggcatatgcaccatatgagagaccagctttgactaaagcatatttgtttccacttgataagaagccagcgcgattgcctggttttcatacttgtgttggatctggtggggaaaggcaaactccagattggtataaagagaaaggaattgagatgttatatgaagatcctgtgacaggcattgatattgaaaaacaaacagcaacgacgatatcaggcaagctgctcaagtatggaactcttatagttgctacaggatgttctgcctctagatttccagagaagatcggaggaaatttacctggtgttcactatataagggatgtggcagatgctgactcattaatatcatctttggagaaggcacataagttggttattgtaggtggtggttatattggcatggaagtagctgcagcagctgttgcttggaaacttgacactacgatcattttcccagagaatcatcttatgcaaaggcttttcactccttcacttgctcaaaaatatgaagaattatatcaagaaaatggtgttaagttcataaagggagcctctatcaagaacttagaagccagttctgatgggcatgtagctgccattaaacttgaaaatggatctactatagaagcagacatggtaataattggtattggggcaaaaccagctgttggtccctttgaaaggctggggttaaataacagtgttggcggaatacaggttgatggtcagttcaggacaggtattcctgggatttttgcaattggagatgtagcagcattcccattaaagatgtataaccgcatggcacgagttgaacatgtagaccatgctcggcgatcagctcagcattgtgtcaaatcactacttactgctcatactagctcatatgattatctcccatatttttattcgagggtttttgagtatgaagggagcccaagaaaagtatggtggcagttctttggagacaatgttggagagacaattcaagtaggaaatttcgatcctaaaattgccaccttctggatagattctggcaaactgaaaggagttctccttgaaagtggaagtcctgaggaatttcaactactccctgaacttgcaaagagccagcctattgttgataaatccaagcttcagtcagcatcttcagttgaagaggctctggagattgctcggacatccctccaggctgcagtttag

SEQ ID NO: 8778 - protein, 497 aa, Populus trichocarpa
MASGSSISSNPMSFKHGLSLWCPQSSPLHRTLQSSPSSSIGFKTFFRNHVVAASSSSFANENREYVIVGGGNAAGYAARSFVEHGMADGKLCIVTREAYAPYERPALTKAYLFPLDKKPARLPGFHTCVGSGGERQTPDWYKEKGIEMLYEDPVTGIDIEKQTATTISGKLLKYGTLIVATGCSASRFPEKIGGNLPGVHYIRDVADADSLISSLEKAHKLVIVGGGYIGMEVAAAAVAWKLDTTIIFPENHLMQRLFTPSLAQKYEELYQENGVKFIKGASIKNLEASSDGHVAAIKLENGSTIEADMVIIGIGAKPAVGPFERLGLNNSVGGIQVDGQFRTGIPGIFAIGDVAAFPLKMYNRMARVEHVDHARRSAQHCVKSLLTAHTSSYDYLPYFYSRVFEYEGSPRKVWWQFFGDNVGETIQVGNFDPKIATFWIDSGKLKGVLLESGSPEEFQLLPELAKSQPIVDKSKLQSASSVEEALEIARTSLQAAV

SEQ ID NO: 8779 - DNA, 1305 bp, Populus trichocarpa
  CDS (1)..(1305)
atggcggagaagagcttcaagtatgtgatcatcggcggtggtgtatctgctggatacgctgctagagagttttgcaagcagggggttaagcccggtgagcttgcaatcatctccaaggaggcggtggctccttatgaacgtcctgcactgagcaaggcttatctttttcctgagggaactgcaagacttccaggattccatgtctgtgttggaagtggaggggagagattacttcctgagtggtacaaagagaaagggattgagttgatccttagcacagaaatagtgaaagcagatcttgctgccaagacacttgttagtgcagctggagaaatattcaagtatcatattttgattattgcaactggttccacagtcattaagttgacagattttggtgtccaaggagctgatgccaaaaacattctctacttgagagaaattgatgatgctgacaaacttgtagaagcaattaaaggaaagaagaatggaaaggctgtaattgttggaggaggatacattggtcttgaacttagtgcagctttaagaatcaacaatattgatgttacaatggtttatcccgaaccatggtgcatgcctcgcctttttactgctggtatagctgccttctatgagggttattatgctaacaaaggagtcaagatcgttaagggaacagttgctgttgggttcaatgctgattcaaatggagaggtaaaggaagtgaaactaaaggatggcagggtgctagaagctgacattgttgttgttggtgttggtggaaggcctcttacaacactatttaaagggcaggttgaagaggagaaaggtggaataaagactgatgcgtttttcaaaactagtatttctgatgtatatgctgtcggtgatgtcgccacatttcctttgaagttgtacaatgatatcagaagagttgaacatgttgaccatgcccgtaaatcagctgagcaggctgtgaaggccatcaagtcaaatgaagaggggaaaacaattgatgtatatgattaccttccattcttctattctcgttcctttgatctgtcctggcaattctacggtgacaatgttggtgatgccgtgctatttggagacaatgatccagcatcacccaagccaaagtttggatcatactggatcaaagatgggaaggttgtcggagtttttctggagggtggaactcccgatgagaataaagcaattgccaaggttgctagggtccagcctcctgttgagaatttggacgtgctgacaaaagaaggtctttctttcgcctgtaagatatga

SEQ ID NO: 8780 - protein, 434 aa, Populus trichocarpa
MAEKSFKYVIIGGGVSAGYAAREFCKQGVKPGELAIISKEAVAPYERPALSKAYLFPEGTARLPGFHVCVGSGGERLLPEWYKEKGIELILSTEIVKADLAAKTLVSAAGEIFKYHILIIATGSTVIKLTDFGVQGADAKNILYLREIDDADKLVEAIKGKKNGKAVIVGGGYIGLELSAALRINNIDVTMVYPEPWCMPRLFTAGIAAFYEGYYANKGVKIVKGTVAVGFNADSNGEVKEVKLKDGRVLEADIVVVGVGGRPLTTLFKGQVEEEKGGIKTDAFFKTSISDVYAVGDVATFPLKLYNDIRRVEHVDHARKSAEQAVKAIKSNEEGKTIDVYDYLPFFYSRSFDLSWQFYGDNVGDAVLFGDNDPASPKPKFGSYWIKDGKVVGVFLEGGTPDENKAIAKVARVQPPVENLDVLTKEGLSFACKI

SEQ ID NO: 8781 - DNA, 1305 bp, Acanthus ebracteatus
  CDS (1)..(1305)
atggcggagaagtcgttcaagtatgtgatccttggtggcggcgttgctgcgggatacgctgctagggagtttgccaagcagggggttcaacctggtgaactggctatcatctccaaagaggctgtggccccttatgaacgcccagcacttagcaaggcatacttgtttcctgaaggaactgcaaggctcccaggtttccatgtgtgcgttggaagtggtggagagagactccttcctgagtggtactctgagaaagggatatctttgatccttagcacggaaattgcccaggcagatcttgcttcaaagacactcaccagtgcaaagggtgaagccttcaaatatgaaacgttaattatagctactggttctactgttattaaactgtcagactttggcgtacaaggtgctgatgccaaaaacatcttttatttgagggaaattgacgatgctgatcaacttgtagaagcaatcaaatctaagccaaatggaaaggctgtgattgttggcggtggatacataggcttggagcttagtgctgctttgagaatcaataatatcgatgtcagcatggtttacccagaaccttggtgcatgcccagactcttcactgctggcatagctgctttctatgaaggatactatgcaaacaagggaatcaacatcattaaaggaactgttgctgttggatttggtgcaaatgaaaaaggagaggttactgatgttaaacttaaggacggtagagtactagaagcagatattgttgttgttggtgtgggtggaagacccctcaccactttgtttaagggtcaggttgcagaggaaaagggtggaatcaagactgatgctttcttcaaaacaagcgtatccagtgtatatgctgtgggtgatgtcgcgacattccccatgaaattgtacaatgacattagaagagttgagcatgtcgatcatgcccgcaaatctgctgaacaggctgttaaggcaatttttgcaagtgaacaaggaaaatcagttgatgaatacgactacctcccatacttctattcgcgtgcctttgacctttcatggcagttctacggtgataacgtgggtgacacagtcatattcggtgacagcaacccaacatctgccactcacaagtttgggacatactggatcaaggatggccaggttgttggtgcatttttggagagcggcagtccagaagagaacaaggcgattgccaatgttgccagggcccagcctccagccggcagcttggatgagctggcctcggagggtcttgcatttgctactaaactgtaa

SEQ ID NO: 8782 - protein, 434 aa, Acanthus ebracteatus
MAEKSFKYVILGGGVAAGYAAREFAKQGVQPGELAIISKEAVAPYERPALSKAYLFPEGTARLPGFHVCVGSGGERLLPEWYSEKGISLILSTEIAQADLASKTLTSAKGEAFKYETLIIATGSTVIKLSDFGVQGADAKNIFYLREIDDADQLVEAIKSKPNGKAVIVGGGYIGLELSAALRINNIDVSMVYPEPWCMPRLFTAGIAAFYEGYYANKGINIIKGTVAVGFGANEKGEVTDVKLKDGRVLEADIVVVGVGGRPLTTLFKGQVAEEKGGIKTDAFFKTSVSSVYAVGDVATFPMKLYNDIRRVEHVDHARKSAEQAVKAIFASEQGKSVDEYDYLPYFYSRAFDLSWQFYGDNVGDTVIFGDSNPTSATHKFGTYWIKDGQVVGAFLESGSPEENKAIANVARAQPPAGSLDELASEGLAFATKL

SEQ ID NO: 8783 - DNA, 1440 bp, Oryza sativa subsp. indica
  CDS (1)..(1440)
atgggccgcgcgttcgagtacgtgatcctgggcggcggcgtggccgccggctacgcggcgctcgagttcgtccgccgcaacggcggcgcatccagccaggagctctgcatcatctccgacgagcactttgctccttatgagcgtcctgcattaagcaaaggctatttgctcccacaagacgcgccgcgtctaccggcatttcatacttgcgttggttctaaggatgagttacttaccgaagaatggtacaacgaacacggcattgtacttgttcttggaacgagggtgatttctgctgatgtgcggcagaagacattgcttacatccagtggggaaaccatcagctataaaactcttatcgttgccacgggtgctcgggccgtgaagctggaagaatttggagtgagcggttcagatgcgaggaacgtctgctatctgcgcaatgtggaggatgcagacaaattagtcggtgtaatgagatcatgtcccggtggaaatgccgttgtcgtcggtggtggatacataggaatggaatgtgcagcggcattggtcacaaacaacataaaagttaccatggtcttccctgaaaaacactgcatgggtcgtctttttacaccgaaaattgctgagttttatgagagctattacgcttcaagaggagttactttcgtcaaagaagctgcggttacttccatgcagatatcagctggaaaggtgactgcagtgaacttgggaaacggtaggcggcttcctgccgacatggtcgtcgtcggcgtcggcgcccgcgcgaacaccgggctgttcgacggccagctggtcatggagaatggcgggatcaaggtgaacggacggatgcaggcgagcgacgcctcggtgtacgccgtgggcgacgtggccgcgttccccgtcaagctgttcggcggcgacgtccgccggctggagcacgtcgactgcgcgcgccggaccgcgcggcacgccgtcgcggcgatgctggagggcaccggatcggtggggcacatcgactacctgccattcttctactccagggtcttctcgctgtcgtggcagttctacggcgacaacgccggggaagccgtgcacttcggggacctcgcgccgcccggcgacggcgacggcgccgcccccaagttcggcgcgtactgggtccgcgacggccgcgtcgccggcgcgttcctcgagggcgggagccggcaggagtacgaggccgtggcggccgccgtccgccgcggggccgcggtggccgacgtcgcggagctcgagaggcgaggcctcgcgttcgccacccaggccaccggcggcggcggcaagcccacctgcgcatggcacgccacggtgggcgtcgccgcggccgtgtccatcgccgccttcgcctgctggtacggctggcaggcgccgtacgtgctcaagcgagacttctga

SEQ ID NO: 8784 - protein, 479 aa, Oryza sativa subsp. indica
MGRAFEYVILGGGVAAGYAALEFVRRNGGASSQELCIISDEHFAPYERPALSKGYLLPQDAPRLPAFHTCVGSKDELLTEEWYNEHGIVLVLGTRVISADVRQKTLLTSSGETISYKTLIVATGARAVKLEEFGVSGSDARNVCYLRNVEDADKLVGVMRSCPGGNAVVVGGGYIGMECAAALVTNNIKVTMVFPEKHCMGRLFTPKIAEFYESYYASRGVTFVKEAAVTSMQISAGKVTAVNLGNGRRLPADMVVVGVGARANTGLFDGQLVMENGGIKVNGRMQASDASVYAVGDVAAFPVKLFGGDVRRLEHVDCARRTARHAVAAMLEGTGSVGHIDYLPFFYSRVFSLSWQFYGDNAGEAVHFGDLAPPGDGDGAAPKFGAYWVRDGRVAGAFLEGGSRQEYEAVAAAVRRGAAVADVAELERRGLAFATQATGGGGKPTCAWHATVGVAAAVSIAAFACWYGWQAPYVLKRDF

SEQ ID NO: 8785 - DNA, 1308 bp, Oryza sativa subsp. indica
  CDS (1)..(1308)
atggcggccgcgaagcacttcacctacgtcatcctcggcggcggcgtcgccgcgggatacgctgcgcgggagttcgccaagcagggcgtcaagcccggggaactcgccatcatctccaaggaatcggtggctccctacgagcgtcctgctctcagcaagggatacctctttcctcagaatgcagccaggcttccgggattccacacctgcgtcgggagcggcggagagaggctcttgcctgaatggtattccgagaaaggtatcgagctgatcctgagcaccgaaattgtcaaggctgatcttgcctccaagacattgaccagttcagctgatgcaacctttacctatgacactttgctcattgccactggctcctcggtcataaagctcactgactttggtgttcaaggagcagaggccaacgacatattgtacctgagggatattgaggacgctgacaagttggtcgcggctatgcaagccaagaaggatggaaaggctgtgattgtcggaggtggctacataggacttgagcttagcgcagccttgaagaccaacaattttgatgtcactatggtgtaccctgaaccttggtgcatgccccgtctcttcacttctggccttgctgctttctacgagggatactacgctaacaaaggaatccatatcataaagggaaccgtggctgttggttttgatgctgatgccaatggagatgttactgcggtgaagctaaagaatggaaacgtgctggaagctgacattgttattgtcggtgtcggtggcaggccactgactcatctcttcaagggtcaagttgcagaggagaagggtggaataaagactgatgcattcttcgaaacgagcgttcctggtgtatacgccattgccgacgtggccgccttcccgatgaagatatacaatgagattaggagagtagagcatgttgaccatgctcgcaaatcagccgagcaggccgtgaaggcgatcaaggcgaaggaggccggcgagtcggtgccggagtacgactacctgccctacttctactcccggtcgttcgacctctcgtggcagttctacggcgacaacgtcggcgaggatgtgctgttcggcgacaacgaccccacggcggccaagcccaagttcggctcgtactggatcaaggacggcaaggtcgtcggcgtcttcctcgaaggcggctcggcggaggagaatcaggtcattgccaaggtcgccagagctcagccgccggtggccgacgtcgaggctctcaagaaggaaggactcgacttcgctgccaaagtctga

SEQ ID NO: 8786 - protein, 435 aa, Oryza sativa subsp. indica
MAAAKHFTYVILGGGVAAGYAAREFAKQGVKPGELAIISKESVAPYERPALSKGYLFPQNAARLPGFHTCVGSGGERLLPEWYSEKGIELILSTEIVKADLASKTLTSSADATFTYDTLLIATGSSVIKLTDFGVQGAEANDILYLRDIEDADKLVAAMQAKKDGKAVIVGGGYIGLELSAALKTNNFDVTMVYPEPWCMPRLFTSGLAAFYEGYYANKGIHIIKGTVAVGFDADANGDVTAVKLKNGNVLEADIVIVGVGGRPLTHLFKGQVAEEKGGIKTDAFFETSVPGVYAIADVAAFPMKIYNEIRRVEHVDHARKSAEQAVKAIKAKEAGESVPEYDYLPYFYSRSFDLSWQFYGDNVGEDVLFGDNDPTAAKPKFGSYWIKDGKVVGVFLEGGSAEENQVIAKVARAQPPVADVEALKKEGLDFAAKV

SEQ ID NO: 8787 - DNA, 1305 bp, Vitis vinifera
  CDS (1)..(1305)
atggcggagaagcattttaaatacgtgatcctcggcggtggcgtttctgctggatatgcagctagggagtttgccaagcaaggggttaagccaggggagctggcaattatttccaaagaggcggttgctccttatgaacgtcctgcgcttagcaaagcctacctatttcctgagggagctgcaagacttcctggatttcatgtttgtgttggaagcggaggagagagacttcttcctgagtggtataaagagaaaggtatagaattgatccttggtacagaaatagtgaaagcagatcttgcatccaaaactctgataagtgcagctggagaaacctttaagtatcacatcttgattattgcaactggttcaacggtcataaggttaactgactttcgtgtagaaggagctgatgcaaaaaatatcttatacttgagagaaatcgatgatgctgacaagcttatagatgtaataaaggccaaaaagaatggaaaggctgtgattgttggaggggggtacattggtctcgagcttagtgcagtgatgaaaatcaacaacttagatgtttgcatggtttatccagaaccatggtgcatgcctcggcttttcactgctggtatagctgctttttatgagggttattatgctaataaaggaatcaaaatcatcaagggaacagtagcagttgggtttacctctgatgcaaatggagaggtaaaggaagtgaaacttaaggatggtagggtgctggaagctgacattgttgttgttggtgttggtggaagaccccttacaacattattcaaaggacaggtggaagaggagaaaggtggaattaagactgatgaattcttcaaaacaagtgttcctgatgtatatgctgtgggagatgttgctactttcccactgaaattgtacaacgaaattagaagagttgaacatgtcgaccatgcccggaaatcagctgagcaagctgtcaaggcaatcaaggcaagtgaggaagggaaatcagttgaggagtatgactaccttccatacttctactctcgtgcctttgatctgtcctggcagttctatggtgacaatgtgggtgaaacagtgctatttggagacaataatccagcatcaccaaaggccaagtttggaacctattggatcaaagatgggaaagtggtgggagcatttctggagggtgggactcctgaagagaacacggccattgccaaagttgcaaggctccaacctgcagttgagaatctggatcaactgactaatgaaggtctcacctttgcctgtaagatttga

SEQ ID NO: 8788 - protein, 434 aa, Vitis vinifera
MAEKHFKYVILGGGVSAGYAAREFAKQGVKPGELAIISKEAVAPYERPALSKAYLFPEGAARLPGFHVCVGSGGERLLPEWYKEKGIELILGTEIVKADLASKTLISAAGETFKYHILIIATGSTVIRLTDFRVEGADAKNILYLREIDDADKLIDVIKAKKNGKAVIVGGGYIGLELSAVMKINNLDVCMVYPEPWCMPRLFTAGIAAFYEGYYANKGIKIIKGTVAVGFTSDANGEVKEVKLKDGRVLEADIVVVGVGGRPLTTLFKGQVEEEKGGIKTDEFFKTSVPDVYAVGDVATFPLKLYNEIRRVEHVDHARKSAEQAVKAIKASEEGKSVEEYDYLPYFYSRAFDLSWQFYGDNVGETVLFGDNNPASPKAKFGTYWIKDGKVVGAFLEGGTPEENTAIAKVARLQPAVENLDQLTNEGLTFACKI

SEQ ID NO: 8789 - DNA, 1305 bp, Picea sitchensis
  CDS (1)..(1305)
atggctgaaaagttttttaagtacgttattgtgggtggtggcgttgcagctggatatgcagccagagaatttgtcaagttgggtctcaaatctggagagcttgcaattatatcgaaagaggctgtagctccatatgaaagacctgcacttagcaaggcttatctctttcccgaaggagctgcgcgactaccaggcttccatgtctgtgttgggattggaggagagaggcagctcccagagtggtatagtgagaaaggtatagagctaattcttagcactgaagtggtgaaagctgaaattgcctccaaaactctcactaccgcagaagggacaactttcaaatatgacactttgatcattgcaactggttccactgttatcaagttatccgactttggtgtgcaaggagctgacgccaagggcatcttttatctgagagagattgccgaagctgatgccttggtatcagcaatacagtcaaaaccagaaggcacagctgtgattgttggtggaggatatattggccttgaactggctgcggtcttaagaatcaacaagtataaagttaaaatggtttaccctgagccatggtgcatgcctcgtcttttcactgcagatatagctgctttctatgagggctattatagaggaaagggtgtggaaataattaaaggaacagtggccacaggatttgtcacggatgagcatgaaaatgttaagatagtaaagttgaaggatggcagggaacttgaggcagacattgttgttgttggtgttggaggaagacctttaacaggacttttcaaaggacagctcgaggaagaaaagggaggcattaagacggatggtttcttcaaaactagtgttcctgacgtttatgcagtaggagacgtggcaactttcccaatgaagatttatggggatattagaagagtcgagcatgtcgatcatgctaggaaatcagcagcgcaagccgtgcaggcaattaaagcgaaagaagaaggaaagagctttgaagaatatgattaccttccatatttctattcacgttcattcgatttgtcatggcaattctatggagacaacgtaggtgaagccattattttcggtgacaataaccctgctacaccaaaagccaaatttggttcatattggataaaagatggcagggtggtaggtgtattcttggagaatggtactcctgaagaaaacaaagccattgctaaggtagcacgtttgaagcctttggtcgaaagcaaggaggaactcataaaggatgggctggcatttgcttctaagatatga

SEQ ID NO: 8790 - protein, 434 aa, Picea sitchensis
MAEKFFKYVIVGGGVAAGYAAREFVKLGLKSGELAIISKEAVAPYERPALSKAYLFPEGAARLPGFHVCVGIGGERQLPEWYSEKGIELILSTEVVKAEIASKTLTTAEGTTFKYDTLIIATGSTVIKLSDFGVQGADAKGIFYLREIAEADALVSAIQSKPEGTAVIVGGGYIGLELAAVLRINKYKVKMVYPEPWCMPRLFTADIAAFYEGYYRGKGVEIIKGTVATGFVTDEHENVKIVKLKDGRELEADIVVVGVGGRPLTGLFKGQLEEEKGGIKTDGFFKTSVPDVYAVGDVATFPMKIYGDIRRVEHVDHARKSAAQAVQAIKAKEEGKSFEEYDYLPYFYSRSFDLSWQFYGDNVGEAIIFGDNNPATPKAKFGSYWIKDGRVVGVFLENGTPEENKAIAKVARLKPLVESKEELIKDGLAFASKI

SEQ ID NO: 8791 - DNA, 1302 bp, Vaccinium corymbosum
  CDS (1)..(1302)
atggtgcattcgttcaagtatatcctcattggaggaggagtttcagctgggtatgcagcaagggagtttgtgaaacaaggagttcatcctggggagcttgcaattatatctaaagaagcggtagcaccttatgaacgtcctgctctgagcaaggcttacctttttccagagtctcctgctaggcttcctgggttccatacctgtgttggaagtgggggagaaagattgcttccagagtggtacagtgagaaagggatacagctgtatctcagtacagaaattgtaagtgcagatcttgctgcaaaatttctgaaaagtgcaaacggagaacacttcgaatatcatattttgatcattgcaactggttcctctgttataaggttgacagactttggggttcaaggagctgatgccaaacacatctactacttaagagaaattgatgatgctgataaattgtacgaagcaattaaacaaaagaaaaatgggaaggttgtgattgttggaggaggatacataggtcttgagctcagtgcagtgatgaaattaaacaatcttgatgtctgcatggtttacccagaaccctggtgcatgcctcggcttttcacagcaggtatagctgctttttatgaaggttactatgcacataagggaattaaaataattaagggaactgttgctgttgggtttacttctgatgcaaatggagaggtaaaggaagtaaaacttaaggacggtagggtgctagaatccgacattgttgttgttggcgttggaggtagacctctcatagggttattcaaaggacaggttgaagaggagaaaggtggaatcaagactgacagcttcttcaaatcaagtgtgcctgatgtatatgctgtgggggacgttgctactttcccaatgaaaatatacaatgaaatgaggagagttgaacatgttgatcacgctcgtaaatctgctgaacatgctgtgaaggcaatctttgcagcagatgaagggacgtcagtcgaagagtatgattaccttccattcttctactctcgttccttcaacctgtcatggcagttctacggggacaacgttggcgagacagtgctatttggagacagcagcccaacatctgaaaatcccaagtttggaacatactggatcaaagacgggaagatagtgggtgcgtttctggagagtgggacaccggaagaaaacaaggctatcgccaatctttctagagtccagcccccagctgatagtttggaccaattagcgaaagagggtattacctttgcatgcaagatttga

SEQ ID NO: 8792 - protein, 433 aa, Vaccinium corymbosum
MVHSFKYILIGGGVSAGYAAREFVKQGVHPGELAIISKEAVAPYERPALSKAYLFPESPARLPGFHTCVGSGGERLLPEWYSEKGIQLYLSTEIVSADLAAKFLKSANGEHFEYHILIIATGSSVIRLTDFGVQGADAKHIYYLREIDDADKLYEAIKQKKNGKVVIVGGGYIGLELSAVMKLNNLDVCMVYPEPWCMPRLFTAGIAAFYEGYYAHKGIKIIKGTVAVGFTSDANGEVKEVKLKDGRVLESDIVVVGVGGRPLIGLFKGQVEEEKGGIKTDSFFKSSVPDVYAVGDVATFPMKIYNEMRRVEHVDHARKSAEHAVKAIFAADEGTSVEEYDYLPFFYSRSFNLSWQFYGDNVGETVLFGDSSPTSENPKFGTYWIKDGKIVGAFLESGTPEENKAIANLSRVQPPADSLDQLAKEGITFACKI

SEQ ID NO: 8793 - DNA, 1449 bp, Solanum lycopersicum
  CDS (1)..(1449)
atggcgactacgcctaatacgatgtcgattaagcaaggtctttcactctggtgtcctcaatcagctgtgttgaatcggatttcaagggtttcggttccttctagaagcttcaggagaagtttcgttgctgcttcatcatttgataatgagaatcgagagtatgtggtagttggaggaggaaatgcagctggatatgctgctagaacttttgttgagcatggacaagctaatggaaagttatgcattgtgaccaaagagccatatgcaccatatgaacgtccagcattgaccaaagcatacttgtttcctctggacaaaaagccagcacgtttaccggggtttcatacttgtgttggcgctggtggtgagaggcaaacacctgattggtacaaggaacaagggatagagatgttgtatgaagatccagtaacaggaattgatatagaaaagcaaactctgacaacaaattcaggaaagctgctcaagtatggcacccttattattgcaaccggatgtacggcatccagatttcctgagaagatcggaggaaatttacctggggttcactatattcgggatgtggcagatgctgattcattaatatcctcactggggaaagcaaaaaaacttgtagttgttggtggtggttatataggaatggaagttgctgcagctgccgtagcctggaaacttgatacaactataatttttccagaagagcatctcttatcaagactgttcactccttctcttgcccaaaagtatgaacaactctaccaagacagtggtgtcaaattcgtcaagggtgctaagataaaacatctagaatctggtccagatagccgggtaactgcagttaagcttgaagatggatcaagtatagagacagacacggttgttattggtattggagcaaaacctgccgtcagtccatttgacatggttggcttaaacaacactgtcggtggaatagaggttgacggacagttccgaacaaacatacctggaatctttgccattggagatgtggcagcatttccattgaagatatacaaccgaattgcacgggtggagcacgttgaccatgctcgtaaatctgcacagcattgtattaaatcattgctaactgcacacacgcacacgcatgactatttaccatacttctactcaagggtttttgaatatgaaggaagctctaggaaagtatggtggcaattctttggtgacaatgttggggaggccgttgaagttgggaattttgatccaaaggttgcaacattttggatcgactctggtaagctgaagggggttcttcttgaaagtgggagtcctgaggaattccaactgcttccaaaacttgcacgaagccagccctctgttgacatagccaaacttcaaaatgcatcgtcggttgaagaggctctagaaattgctcaagcttccttgtag

SEQ ID NO: 8794 - protein, 482 aa, Solanum lycopersicum
MATTPNTMSIKQGLSLWCPQSAVLNRISRVSVPSRSFRRSFVAASSFDNENREYVVVGGGNAAGYAARTFVEHGQANGKLCIVTKEPYAPYERPALTKAYLFPLDKKPARLPGFHTCVGAGGERQTPDWYKEQGIEMLYEDPVTGIDIEKQTLTTNSGKLLKYGTLIIATGCTASRFPEKIGGNLPGVHYIRDVADADSLISSLGKAKKLVVVGGGYIGMEVAAAAVAWKLDTTIIFPEEHLLSRLFTPSLAQKYEQLYQDSGVKFVKGAKIKHLESGPDSRVTAVKLEDGSSIETDTVVIGIGAKPAVSPFDMVGLNNTVGGIEVDGQFRTNIPGIFAIGDVAAFPLKIYNRIARVEHVDHARKSAQHCIKSLLTAHTHTHDYLPYFYSRVFEYEGSSRKVWWQFFGDNVGEAVEVGNFDPKVATFWIDSGKLKGVLLESGSPEEFQLLPKLARSQPSVDIAKLQNASSVEEALEIAQASL

SEQ ID NO: 8795 - DNA, 1506 bp, Zea mays
  CDS (1)..(1506)
atgggccgcgcgttctgttacgtgatactaggcggaggcgtggccgcgggctacgcggcgctccagttcatccgcctcggctgcgaaaccgccgcccaagccggagagttctgcatcatctccgacgaggccgttccaccttatgaacgtcctacgctgagcaaaggctatttgttcccagaaggtggtgctcgcctcccagcgtttcatacttgtgttggtgccaacgatcagttacttgatgcagattggtacagggaatatggtatcgagcttattctcggaacgaaggtgatttccgtcgatgtgcgccggaaaacactggatacttccgccggggaaaccatcagctatgaaaggcttattgttgcgacgggtgctcgggccgtgaagctggaagagatcggagtgaacggcggctcagatgccgagaacgtctgttatctgcgcgacatcgcggacgcggataagttagtccgtgtgatgagatcatgtcctgctggcgccgacgccgtggtcgtcggcggcggatacataggaatggaatgtgcagccgctctggttgccaacaggatgaaagtcactgtcgtcttccccggaaaacacttgatggcaaatctgttcacaccgaagatcgctgagttttacgagaactactacgaatcgaaaggagtcacttttataaaaggaactgcggtttcatctctgcagatctcgtctgggaaggtgacggcagcaatcctgcgagacggcaggcgcctacctgcggacatggtcgtggtcggcatcggcgcgcgcgccaacacggagctcttcgaaggccagctggccatggagaagggcggcatcaaggttgacggacagatgcggacgagcgacgcatccgtgtacgccgtgggcgacgtggccgcgttccccgtcaagctgctgggcggcgaggtccgccggctggagcacgtggactgcgcgcgcatgaccgcgaggcacgccgtcgcgggggctctggagcccttgggcccgatcaccggggaaatcaactacgtgcccttcttctactccagggtcttcgcgctgtcctggaggttctacggcgacaacgccggggaggccgtgcactttggggacctggacttctccgcttcgccttctcctccgtccgcgcccaagttcggcgcgctctgggtccgcgcgggccgcgtcaccggcgcgttcctggaaggtgggagccctgaggagtacgaggcgctcgcgcgcgccgtgcggcgcaggacgaccgtcccggacgtggccgtgctcctcgcgcggtggggcctcgcgttcattgtccaggaccaggagggccggagcggagccacgcggtcgggtaggctttgtggcagcggcaacacgtccaactacgcatgggcatggcacgccacggtcggcgtggccgcggccgtgtccattgcggcgttcgcgtactggtatggatggaaggcgccgtacctggcgaaacgccacttctga

SEQ ID NO: 8796 - protein, 501 aa, Zea mays
MGRAFCYVILGGGVAAGYAALQFIRLGCETAAQAGEFCIISDEAVPPYERPTLSKGYLFPEGGARLPAFHTCVGANDQLLDADWYREYGIELILGTKVISVDVRRKTLDTSAGETISYERLIVATGARAVKLEEIGVNGGSDAENVCYLRDIADADKLVRVMRSCPAGADAVVVGGGYIGMECAAALVANRMKVTVVFPGKHLMANLFTPKIAEFYENYYESKGVTFIKGTAVSSLQISSGKVTAAILRDGRRLPADMVVVGIGARANTELFEGQLAMEKGGIKVDGQMRTSDASVYAVGDVAAFPVKLLGGEVRRLEHVDCARMTARHAVAGALEPLGPITGEINYVPFFYSRVFALSWRFYGDNAGEAVHFGDLDFSASPSPPSAPKFGALWVRAGRVTGAFLEGGSPEEYEALARAVRRRTTVPDVAVLLARWGLAFIVQDQEGRSGATRSGRLCGSGNTSNYAWAWHATVGVAAAVSIAAFAYWYGWKAPYLAKRHF

SEQ ID NO: 8797 - DNA, 1461 bp, Picrorhiza kurrooa
  CDS (1)..(1461)
atgtcgagtatctcaaacgcactttcgttcaagcacggactttccttatggtgtccccactcaacctcagtcaatcaaatttctcagccttgttcagtttcttccaagattttccgaagaagattctctgttttggcttcctctttcgccaatgagaatagggaatttgtgattgttggaggtggaaatgcatctggttatgcagctcgaacttttgtggagcatggaatggctgatggaaagctttgcattgtatccaaagaggcatatgtaccttatgagcgtccagcattgacgaaagcttacttgttccctttggacaaaaagccagcacgtctaccgggtttccatacttgtgttggggccggtggtgaaaggcagactcctgactggtacaaggagaaaggaatagagatgctgcatgaagatccagtggcagacattgatactgaaaagcaaacgctaacgaccaattctggaaaattgctcaagtatgggtctctgattattgctactggatgtactgcttcaagatttccagataaaattggaggaaacttaccgggtgttcattatgttcgtgatgttgcagatgcaaattcacttatatcgtcactggaaaaatcaaagaaagttgtggttgttggtggtggctatattggcatggaagttgcagcagccactgttgcctggaaacttgacacaactattattttccctgaagaccacctcatgacaagattgtttaccccttccctggcacaaaagtatgaagatctatacaaagattacggagtcaattttgtcaagggtgcttcaattaaaagtttagaagctggctctgatggtcgtgtttctggtgtcaaacttgagaatggttctattattgaagcagacacggttgtcattggaattggagggaaaccagcagttggtccatttgaaagtgttggtttaaataagactgttggtggaatacaggttgatggcctgttcagaacaagcatacctggaatttttgctattggggatgtagcagcttttcccttaaagatttacgaccggattacacgggttgagcatgtggatcatgctcgtcggtctgcacagcattgtgttaaatcactattaactgcacatactgacacgtatgattatctcccccttttctactcaagagtgtttgagcatgaagggagcccaaggaaagtatggtggcaattctttggggataacgttggtgagactgttgaagttggaaatttcgatccgaaaattgcaactttctggatagactcagggaaactaaaaggtgttcttcttgaaagcgggagtcctgaggagttccaattgcttcccaaacttgctagaagccaaccctctgtcgacgtagcaaagcttcagaaagcatcttcagtggacgaagcattggaaattgctcaagcttcctcacaaggttga

SEQ ID NO: 8798 - protein, 486 aa, Picrorhiza kurrooa
MSSISNALSFKHGLSLWCPHSTSVNQISQPCSVSSKIFRRRFSVLASSFANENREFVIVGGGNASGYAARTFVEHGMADGKLCIVSKEAYVPYERPALTKAYLFPLDKKPARLPGFHTCVGAGGERQTPDWYKEKGIEMLHEDPVADIDTEKQTLTTNSGKLLKYGSLIIATGCTASRFPDKIGGNLPGVHYVRDVADANSLISSLEKSKKVVVVGGGYIGMEVAAATVAWKLDTTIIFPEDHLMTRLFTPSLAQKYEDLYKDYGVNFVKGASIKSLEAGSDGRVSGVKLENGSIIEADTVVIGIGGKPAVGPFESVGLNKTVGGIQVDGLFRTSIPGIFAIGDVAAFPLKIYDRITRVEHVDHARRSAQHCVKSLLTAHTDTYDYLPLFYSRVFEHEGSPRKVWWQFFGDNVGETVEVGNFDPKIATFWIDSGKLKGVLLESGSPEEFQLLPKLARSQPSVDVAKLQKASSVDEALEIAQASSQG

SEQ ID NO: 8799 - DNA, 1305 bp, Camellia sinensis
  CDS (1)..(1305)
atggcggagaagactttcaagtacgtgattctcggcggtggcgtctctgctggttatgcggctagggaatttgccaaacaaggagttaagccaggcgagcttgcaattatttccaaagagggggttgctccttatgaacgtccagcactcagcaaggcatacctgtttcctgagtcacctgcaagacttccagggtttcatgtctgtgttggaagcgggggagagaggctgcttccggagtggtatgcacagaaaggaattgcattgatcctcaatacagaaatagtgaaagcagatcttgctacaaagactctcgttagtgctgctggagaaactttcaattatcacttcttgataatcgcaactggttcttcagttataaggttgacagactttggtgtacaaggtgctgatgccaaaaacatctactacttgagagaaattgatgatgctgataaacttgtagaagcaattcaggtgaagaaaaacggaaaggttgtgattgttggaggaggatacataggtcttgagctgagtgcagtgatgaagttaaacaatctcgatgtcaacatggtttacccagaaccgtggtgcatgcctcggcttttcacagcaggtatagctgctttctacgaaggttattatgcaaataagggaattaaaattattaagggaactgtagctgttgggtttactgctgatgcaaatggagaggtaaaggaagtaaaacttaaggatggtagagtgctggaagcagacattgttgttgttggagttggaggtagacctcttaccaccttattcaaaggacaggttgaagaggagaaaggtggaattgagaccgacagtttcttcaaaacaagtgctccacatgtatatgccgtgggggatgttgctactttcccgatgaaaatctacaatgaaatgcgaagggttgaacatgttgaccatgcccgtaaatctgctgagcatgctgtgaaggctatatttgcaagcacagaagggaagtcaattgaggagtatgactaccttccattcttctattcccgttccttcaatctgtcatggcagttctatggcgacaatgttggcgacactgttctatttggagacaacagcccaacatctgaaaatcccaagtttggttcatactggatcaaagacgggaaggtagtgggtgcttttctggagagtgggactcctgaagaaaacaaggctattgccaaagttgcaagggtccaacccccagttgagagtttggacctattggcaaaggatggtctcacctttgcctgcaagatttaa

SEQ ID NO: 8800 - protein, 434 aa, Camellia sinensis
MAEKTFKYVILGGGVSAGYAAREFAKQGVKPGELAIISKEGVAPYERPALSKAYLFPESPARLPGFHVCVGSGGERLLPEWYAQKGIALILNTEIVKADLATKTLVSAAGETFNYHFLIIATGSSVIRLTDFGVQGADAKNIYYLREIDDADKLVEAIQVKKNGKVVIVGGGYIGLELSAVMKLNNLDVNMVYPEPWCMPRLFTAGIAAFYEGYYANKGIKIIKGTVAVGFTADANGEVKEVKLKDGRVLEADIVVVGVGGRPLTTLFKGQVEEEKGGIETDSFFKTSAPHVYAVGDVATFPMKIYNEMRRVEHVDHARKSAEHAVKAIFASTEGKSIEEYDYLPFFYSRSFNLSWQFYGDNVGDTVLFGDNSPTSENPKFGSYWIKDGKVVGAFLESGTPEENKAIAKVARVQPPVESLDLLAKDGLTFACKI

SEQ ID NO: 8801 - DNA, 1437 bp, Zea mays
  CDS (1)..(1437)
atggggcgcgcgttcgtgtacgtgatcctgggcggcggcgtggccgcgggctacgccgcgctcgagttcgcccgccgcggtgggtactcccgcggagagctctgcatcatctccgaagaggccgttgctccttatgaacgtcctgcactaagcaaaggctatttactcccagaaggtgctgctcgtcttccaggatttcatacttgtgttggtgctaatgatgagttactgacaccaaaatggtacaaagaacaaggcattgaacttgttcttggaacaaaagtgatttctgctgatgtgaggcgcaagacattgcttacaggcactggtgaaactatcagctacaaaactctaattattgcgacaggtgctcgggctttgaagctgcaagaatttggaatacaaggttcagatgcttcaaacatatgttatttgcgcaacatcgatgacgcggataagttggtgagtgtgatgaaatcatgtcctggtggaaatgctgttgtcattggtggtggctacattggaatggagtgtgcagcggcattggttactaacaagataagggtcaccatggtcttccctgagaaacactgcatgggtcgtctatttacaccaaaaattgcagaattttatgaaaactactacacctcgaaaggggtcacctttgttaaaggaactgtgcttacatcctttgaaaaagatatgacggggaaggtgactgcagtaatactcaaagatggtaggcaccttcctgctgatatggtagtagttggtattggcatccgtgcaaacactagcctttttgaaggtcaactgatgatgtcaacagagaatggtgggataaaggtaaatggacaattgcagacaagcgacagctctgtgtatgccgttggcgatgtggcggcgttcccgatcaagcttttcgacgatgatatccgacggctcgagcatgtggactcagctcgtagaactggtagacatgctgttgcctccatcttggatccttcaaagaccagggacatcgattacctgccgttcttctactccagagtgttcacgttgtcctggcaattctacggggataatgtcggggaagtggtccactttggagacttcacaagcagcagtccgaggttcggtgcatattgggtcaataaagggcggatcgcgggtgcgtttcttgaaggcggaagtcgggaggagtacgaggccatctcgatcgctgttcggcgggaagctgtggtcacagacatgggtgaactcgagaaacaaggcctggcactcgccattcaggagagccagaaggaggtgcctgacagtgggcttgctgttgtcggaaaacctacttatgcgtggcatgccacagctggtgtcgttgcagctgtgtcgatcgctgcaattgggtattggtatggcaggaagcgccgcaggtggtga

SEQ ID NO: 8802 - protein, 478 aa, Zea mays
MGRAFVYVILGGGVAAGYAALEFARRGGYSRGELCIISEEAVAPYERPALSKGYLLPEGAARLPGFHTCVGANDELLTPKWYKEQGIELVLGTKVISADVRRKTLLTGTGETISYKTLIIATGARALKLQEFGIQGSDASNICYLRNIDDADKLVSVMKSCPGGNAVVIGGGYIGMECAAALVTNKIRVTMVFPEKHCMGRLFTPKIAEFYENYYTSKGVTFVKGTVLTSFEKDMTGKVTAVILKDGRHLPADMVVVGIGIRANTSLFEGQLMMSTENGGIKVNGQLQTSDSSVYAVGDVAAFPIKLFDDDIRRLEHVDSARRTGRHAVASILDPSKTRDIDYLPFFYSRVFTLSWQFYGDNVGEVVHFGDFTSSSPRFGAYWVNKGRIAGAFLEGGSREEYEAISIAVRREAVVTDMGELEKQGLALAIQESQKEVPDSGLAVVGKPTYAWHATAGVVAAVSIAAIGYWYGRKRRRW

SEQ ID NO: 8803 - DNA, 1536 bp, Oryza sativa subsp. indica
  CDS (1)..(1536)
atggcttccacggccgcggcggcgtcgtcgcaggggtgcatctcgtgggcgctgcggcagcgtgggcttggtggtggtggtgcgcgggctgtcccggtgcttccccgccggagattctgcgtctccgcggcggcggtgggtgggtgggtgggtggtgtgtccaagcccaagaagaaatgggatgctcatcaggtgtttgatgaattgccgaacccgagtcgcaggtatgtgatcgtgggtggaggcaacgcggccggttacgcggcgaggacgttcgtcgagcacggcatggctgatggccgcctttgcatcgtctccaaggaggcgtatccgccatatgagcgaccagcactgacaaagggctatcttttccctccagacaagaagcctgctcgtctacctggctttcatacctgtgttggatcaggtgggcagaggcagactgctgaatggtacaaggagaacggcatagaggtattgtatgaggatccagttgtagcgtttgatggcaaaacacataccttaaaaacttcatcagggaaaattctgaagtatgggtcacttattatttctactggctgtgaagcttcaaggttacctgctaagattggaggaaatttgcctggagttcactatatacgtgatgttgctgatgcggattctctagtatcttcattgggaaaagcaaagaaaattgttgttattggtgggggctatattggcatggaggtagcagcagcagcttgtggctggaatctcgacacaactattatattcccagaggaccacattatgccaagactctttacaccttcccttgctaagaagtatgaggaactgtatcagcaaaatggtgtcaaattcattaagggagctcttattgataaacttgaagctggctctgatggtagggtgtcatctgcagtacttgaagatggatctgtagttgaagctgatacagttattgttggtataggagcaagaccagttattggcccatttgaagctgttggggtcaacactaaagttggtggaatagaggttgattccttgtttagaactagtatacctggtatctttgctattggagatgtagcagcttttcccctcaagatgtatgatagaatgactcgagttgagcatgtggatcatgctcggaagtctgcacaccactgtgttgaagcactcctaacatcacacacaaagccgtatgactaccttccatatttctattcaagagtttttgagtacgaaggaagttcaaggaaaatttggtggcaattttacggtgataatgttggcgaaacaattgaagtgggaagctttgaaccaaagattgctaccttctggattgactctgatagtcgactgaagggtgttttccttgagagtggtagctcagaggaattttcgcttcttcctcaactcgctaagtctcagcccgttgtagacaaagctaagctcaaaagtgcaacctctgtcgaggatgccttagagatcgcaagaagctctctccactctggttcttctgtttag

SEQ ID NO: 8804 - protein, 511 aa, Oryza sativa subsp. indica
MASTAAAASSQGCISWALRQRGLGGGGARAVPVLPRRRFCVSAAAVGGWVGGVSKPKKKWDAHQVFDELPNPSRRYVIVGGGNAAGYAARTFVEHGMADGRLCIVSKEAYPPYERPALTKGYLFPPDKKPARLPGFHTCVGSGGQRQTAEWYKENGIEVLYEDPVVAFDGKTHTLKTSSGKILKYGSLIISTGCEASRLPAKIGGNLPGVHYIRDVADADSLVSSLGKAKKIVVIGGGYIGMEVAAAACGWNLDTTIIFPEDHIMPRLFTPSLAKKYEELYQQNGVKFIKGALIDKLEAGSDGRVSSAVLEDGSVVEADTVIVGIGARPVIGPFEAVGVNTKVGGIEVDSLFRTSIPGIFAIGDVAAFPLKMYDRMTRVEHVDHARKSAHHCVEALLTSHTKPYDYLPYFYSRVFEYEGSSRKIWWQFYGDNVGETIEVGSFEPKIATFWIDSDSRLKGVFLESGSSEEFSLLPQLAKSQPVVDKAKLKSATSVEDALEIARSSLHSGSSV

SEQ ID NO: 8805 - DNA, 1308 bp, Oncidium Gower Ramsey
  CDS (1)..(1308)
atggcagggatccactacaagtatttgattctcggaggaggagtatcagcgggatgtgctgctagggaattcgtaaagcttggcgtcggtccgggaaacttggcggttatttcgaaagagggggtagctccttacgagagaccagctcttagcaaggcataccttttcccacaaggtgctgcaagattacctggttttcacgtatgtgttgggagtggtggagagagactacttcctgaatggtatactgaaaaaggtatagatctgatactgagcactgaaattgtgaaagcggaactttctaataagactcttaccagtgcagctggtgcaactttcacttatgacaatttggtcattgccactggttcatctgtaataaaattgactgactttggcgttgaaggggcaaatgccaacaatatattataccttagggagattgatgacgctgataaactagttgaagtaatacagagcaagaagaatgggaaggctgtgattgtgggaggtggatacattggtcttgaacttggtgctacactcaaactaaatgatctagatgtgacgatggtgtaccctgagccctggtgtatgcctcggctctttactgctggaattgctgctttttatgagggttattatgcaaacaaaggaattaaaataatcaaagggactgtggcggttgggtttgaatctgatgttaatggggatgtgaccgcggtaaagctgaaggatggaagagtactggatgctgatattgttgttgttggtgttggtggaagaacctctacaacactttttaaaggtcaaattgatgaagagaaaggaggaattaagaccgatggcttcttcaaaaccagcgtccctggcgtttatgctgtgggagatgttgctacctttcctctgaaactgtacaacgagttgaggcgagtagagcacgttgatcatgcaagaaaatccgcagagcaagctgcaaaggcaatcaaggcagctgaagaaggcataagcattgaagaatatgattacctcccatacttctattctcgtgcgtttgatctatcttggcaattctatggagacaacgtcggagacacggttctcttcggcgatagcgatccatcgtctgctaagccgaaatttggtacatattggattaaagatgggaacgtcattggtgcatttctggaatctggtacgccggaggagaacaaggcaattgctaaggttgctcggctccagccatcggctgtagacttggagcagctcaagaatgaaggcctctccttcgcatcaaagttggagtga

SEQ ID NO: 8806 - protein, 435 aa, Oncidium Gower Ramsey
MAGIHYKYLILGGGVSAGCAAREFVKLGVGPGNLAVISKEGVAPYERPALSKAYLFPQGAARLPGFHVCVGSGGERLLPEWYTEKGIDLILSTEIVKAELSNKTLTSAAGATFTYDNLVIATGSSVIKLTDFGVEGANANNILYLREIDDADKLVEVIQSKKNGKAVIVGGGYIGLELGATLKLNDLDVTMVYPEPWCMPRLFTAGIAAFYEGYYANKGIKIIKGTVAVGFESDVNGDVTAVKLKDGRVLDADIVVVGVGGRTSTTLFKGQIDEEKGGIKTDGFFKTSVPGVYAVGDVATFPLKLYNELRRVEHVDHARKSAEQAAKAIKAAEEGISIEEYDYLPYFYSRAFDLSWQFYGDNVGDTVLFGDSDPSSAKPKFGTYWIKDGNVIGAFLESGTPEENKAIAKVARLQPSAVDLEQLKNEGLSFASKLE

SEQ ID NO: 8807 - DNA, 1350 bp, Oryza sativa subsp. japonica
  CDS (1)..(1350)
atggcggccgcgaagcacttcacctacgtcatcctcggcggaggcgtcgccgcgggatacgctgcgcgggagttcgccaagcagggcgtcaagcccggggaactcgccatcatctccaaggaatcggtggctccctacgagcgtcctgctctcagcaagggatacctctttcctcagaatgcagccagacttccgggattccacacctgcgtcgggagcggcggagagaggctcttgcctgaatggtattccgagaaaggtatcgagctgatcctgagcaccgaaattgtcaaggctgatcttgcctccaagacattgaccagttcagctgatgcaacctttacctatgacactttgctcattgccactggctcctcggtcataaagctcactgactttggtgttcaaggagcagaggccaacgacatattgtacctgagggatattgaggacgctgacaagttggtcgcggctatgcaagccaagaaggatggaaaggctgtgattgtcggaggtggctacataggacttgagcttagcgcagccttgaagaccaacaattttgatgtcactatggtgtaccctgaaccttggtgcatgccccgtctcttcacttctggccttgctgctttctacgagggatactacgctaacaaaggaatccatatcataaagggaaccgtggctgttggttttgatgctgatgccaatggagatgttactgcggtgaagctaaagaatggaaacgtgctggaagctgacattgttattgtcggtgtcggtggcaggccactgactcatctcttcaagggtcaagttgcagaggagaagggtggaatcaagactgatgcattcttcgaaacgagcgttcctggtgtatacgccattgccgacgtggccgccttcccgatgaagctatacaatgagattaggagagtagagcatgttgaccatgctcgcaaatcagccgagcaggccgtgaaggcgatcaaggcgaaggaggccggcgagtcggtgccggagtacgactacctgccctacttctactcccggtcgttcgacctctcgtggcagttcctacggcgacaacgtcggcgaggatgtgctgttcggcgacaacgaccccacggcggccaagcccaagttcggctcgtactggatcaaggacggcaaggtcgtcggcgtcttcctcgagggcggctcggcggaggagaatcaggtcattgccaaggtcgccagagctcagccgccggtggccgacgtcgaggctctcaagaaggaaggactcgacttcgctgccaaagtctgaacctctctatgcacacgcatttcattttgtggacgctgtga

SEQ ID NO: 8808 - protein, 449 aa, Oryza sativa subsp. japonica
MAAAKHFTYVILGGGVAAGYAAREFAKQGVKPGELAIISKESVAPYERPALSKGYLFPQNAARLPGFHTCVGSGGERLLPEWYSEKGIELILSTEIVKADLASKTLTSSADATFTYDTLLIATGSSVIKLTDFGVQGAEANDILYLRDIEDADKLVAAMQAKKDGKAVIVGGGYIGLELSAALKTNNFDVTMVYPEPWCMPRLFTSGLAAFYEGYYANKGIHIIKGTVAVGFDADANGDVTAVKLKNGNVLEADIVIVGVGGRPLTHLFKGQVAEEKGGIKTDAFFETSVPGVYAIADVAAFPMKLYNEIRRVEHVDHARKSAEQAVKAIKAKEAGESVPEYDYLPYFYSRSFDLSWQFLRRQRRRGCAVRRQRPHGGQAQVRLVLDQGRQGRRRLPRGRLGGGESGHCQGRQSSAAGGRRRGSQEGRTRLRCQSLNLSMHTHFILWTL

SEQ ID NO: 8809 - DNA, 1623 bp, Oryza sativa subsp. japonica
  CDS (1)..(1623)
atggcttccacggccgcggcggcgtcgtcgcaggggtgcatctcgtgggcgctgcggcagcgtgggcttggtggtggtggtgcgcgggctgtcccggtgcttccccgccggagattctgcgtctccgcggcggcggtgggtgggtgggtgggtggtgtgtccaagcccaagaagaaatgggatgctcatcaggtgtttgatgaattgccgaacccgagtcgcaggtatgtgatcgtgggtggaggcaacgcggccggttacgcggcgaggacgttcgtcgagcacggcatggctgatggccgcctttgcatcgtctccaaggaggcgtatccgccatatgagcgaccagcactgacaaagggctatcttttccctccagacaagaagcctgctcgtctacctggctttcatacctgtgttggatcaggtgggcagaggcagactgctgaatggtacaaggagaacggcatagaggtattgtatgaggatccagttgtagcgtttgatggcaaaacacataccttaaaaacttcatcagggaaaattctgaagtatgggtcacttattatttctactggctgtgaagcttcaaggttacctgctaagattggaggaaatttgcctggagttcactatatacgtgatgttgctgatgcggattctctagtatcttcattgggaaaagcaaagaaaattgttgttattggtgggggctatattggcatggaggtagcagcagcagcttgtggctggaatctcgacacaactattatattcccagaggactacattatgccaagactctttacaccttcccttgctaagaagtatgaggaactgtatcagcaaaatggtgtcaaattcattaagggagctcttattgataaacttgaagctggctctgatggtagggtgtcatctgcagtacttgaagatggatctgtagttgaagctgatacagttacgaccttcttcttcttcttcttcttcttcttttgtgcaaatatcttgtttcatcatcttaattatttgttgctcaggatgaaagttattgttggtataggagcaagaccagttattggcccatttgaagctgttggggtcaacactaaagttggtggaatagaggttgattccttgtttagaactagtatacctggtatctttgctattggagatgtagcagcttttcccctcaagatgtatgatagaatgactcgagttgagcatgtggatcatgctcggaagtctgcacaccactgtgttgaagcactcctaacatcacacacaaagccgtatgactaccttccatatttctattcaagagtttttgagtacgaaggaagttcaaggaaaatttggtggcaattttacggtgataatgttggcgaaacaattgaagtgggaagctttgaaccaaagattgctaccttctggattgactctgatagtcgactgaagggtgttttccttgagagtggtagctcagaggaattttcgcttcttcctcaactcgctaagtctcagcccgttgtagacaaagctaagctcaaaagtgcaacctctgtcgaggatgccttagagatcgcaagaagctctctccactctggttcttctgtttag

SEQ ID NO: 8810 - protein, 540 aa, Oryza sativa subsp. japonica
MASTAAAASSQGCISWALRQRGLGGGGARAVPVLPRRRFCVSAAAVGGWVGGVSKPKKKWDAHQVFDELPNPSRRYVIVGGGNAAGYAARTFVEHGMADGRLCIVSKEAYPPYERPALTKGYLFPPDKKPARLPGFHTCVGSGGQRQTAEWYKENGIEVLYEDPVVAFDGKTHTLKTSSGKILKYGSLIISTGCEASRLPAKIGGNLPGVHYIRDVADADSLVSSLGKAKKIVVIGGGYIGMEVAAAACGWNLDTTIIFPEDYIMPRLFTPSLAKKYEELYQQNGVKFIKGALIDKLEAGSDGRVSSAVLEDGSVVEADTVTTFFFFFFFFFCANILFHHLNYLLLRMKVIVGIGARPVIGPFEAVGVNTKVGGIEVDSLFRTSIPGIFAIGDVAAFPLKMYDRMTRVEHVDHARKSAHHCVEALLTSHTKPYDYLPYFYSRVFEYEGSSRKIWWQFYGDNVGETIEVGSFEPKIATFWIDSDSRLKGVFLESGSSEEFSLLPQLAKSQPVVDKAKLKSATSVEDALEIARSSLHSGSSV

SEQ ID NO: 8811 - DNA, 1482 bp, Ricinus communis
  CDS (1)..(1482)
atgtctccagtacggaaattaatggcgacgatatcaaattcacttcctcttaagcacggtctatctctctggtgtccacactcttcttctcttaatcgaaccttccacactcctcccatcgcttaccggatcgtacaccgtaactacgtcgtttccgccttctctaatgagaatcgcgagtttgtgatcgttggtggcgggaatgctgccggatatgctgcacggacatttgtcgaacatggaatggcagatggaaggctttgtattgttactaaggagccacatgcaccatatgagagaccagctttgactaaagcctatttgtttccactagataagaagccagctcgtttgcctggttttcatacttgtgttggatctggtggggaaaggcaaactcctgattggtatcaagagaaaggaatagagatgttgtatgaagatccggtgacaagtattgacattgaaaagcaaactctaggaacaaactcaggcaagctgctcaagtatggaactcttattattgccacaggatctacagcatcaagatttccagagaaaattggaggaagtttacctggtgttcactacatcagggatgtggcagacgccgattcccttatatcatctttggataaggcaaggaaggtggttgtcgttggtggaggttatattggcatggaggtcgctgcagcagctgttggttggaacctggatactacaatcatttttccagagaagcatctcttgcaaaggttgtttactccttcacttgcccagaggtatgaggaattatacaaagagaatggtgtcaaatttttaaagggtgcctctatcaaaaacttagaagctggttcagatggacatgtagctactgttaaactagaagatggatctattatagaagcagacacggtagtgattggaattggggcaaagccagctgtcagtccctttgaacaagtggggttgaatgctactgttggtggaatacaggttgatggtcagttcaggacaaataaacctggaattttcgcaattggagatgttgcagcgttcccattaaagatgtataaccgtacggccagagttgaacatgtagaccatgctcgtcgatcagctcggcattgtgttaaagcattacttagtgctcagactagcacatatgattatctcccatacttttactcaagggtctttgagtatgaagggagcccaagaaaaatatggtggcagttctttggagacaatgttggagaagcagttgagattgggaattttgatcctaagattgcaactttctggatagattctggtaaattgaaaggaattctccttgaaagtggaagtgctgaggaatttcaactccttcctaaactcgcaaggagccagcctagtgttgataaatcaaagcttctgaaagcatcttcagttgaggaggcgctagaaattgctcaagcatccctacacactgctgtttag

SEQ ID NO: 8812 - protein, 493 aa, Ricinus communis
MSPVRKLMATISNSLPLKHGLSLWCPHSSSLNRTFHTPPIAYRIVHRNYVVSAFSNENREFVIVGGGNAAGYAARTFVEHGMADGRLCIVTKEPHAPYERPALTKAYLFPLDKKPARLPGFHTCVGSGGERQTPDWYQEKGIEMLYEDPVTSIDIEKQTLGTNSGKLLKYGTLIIATGSTASRFPEKIGGSLPGVHYIRDVADADSLISSLDKARKVVVVGGGYIGMEVAAAAVGWNLDTTIIFPEKHLLQRLFTPSLAQRYEELYKENGVKFLKGASIKNLEAGSDGHVATVKLEDGSIIEADTVVIGIGAKPAVSPFEQVGLNATVGGIQVDGQFRTNKPGIFAIGDVAAFPLKMYNRTARVEHVDHARRSARHCVKALLSAQTSTYDYLPYFYSRVFEYEGSPRKIWWQFFGDNVGEAVEIGNFDPKIATFWIDSGKLKGILLESGSAEEFQLLPKLARSQPSVDKSKLLKASSVEEALEIAQASLHTAV

SEQ ID NO: 8813 - DNA, 1437 bp, Ricinus communis
  CDS (1)..(1437)
atggggagagcatttgtgtatgtgattttaggaggaggagtggcagctgggtatgcagctcttgaattcacaagaaaaggggtctctcctggtgaactctgcatcatttctgaagaacctgttccaccttatgagagacctgcattgagtaaagggtacttacttccagaagctccagcacgccttccatcatttcacacttgtgttggagctaatgaggagaggttgactccaaaatggtacaaagagcatggcattgaattagtccttggaactcgagttaagtctgctgatgtgagacggaagacactactaactgcagctggggagactataagctacaaaattctcatcattgcaacaggtgctcgggccttaaagctcgaagaatttggagtgaatggatcaaatgctgaaaatgtttgttatctacgggatgtagctgatgccgacagacttgttaatgtgatgcaatcttgcactggtgggaatgctgttatcattggtggtggctatataggaatggagtgtgctgcatctttggcaatcaataaaatgaatgtgaccatggttttccctgaagcacattgcatggcccgtttgtttacccccaagattgcaagttattatgaagattactacaaatgtaaaggagtacagttcatcaagggaactgtcttgtcatctttggatatggattccaatggaaaggttacagctgttaatcttagagatgggaatcggctgcctgcagatatagttgtagtaggaattgggatacgtccgaacacaagtctctttgaaggccagctaactctggagaagggtgggatcaaagtgaatggtcgaatgcagacaagcatcacgtcggtctatgcagttggagatgttgcatcatttccggtcaaattatttggcgaaactcgtaggctggagcatgttgattcagctcgaaaatcagcaagatatgctgttgctgcaataatggagccaaataaaacagttgatttcgactacctgccatttttctactccagagtctttgcattatcttggcagttttatggggacaatgcaggggaagtagtgcactttggggattactcagggagtacgattggggcatactgggtaagcaaaggtcatctggttggttcgttccttgaaggaggaaccaaagaagaatatgaagctatagccaaggccacgagactcaagccagcaattgaggacacgagtgatctggaaaggcagggtttgggctttgcgttggcagtcagtgagaatccagtaacatccccacctggcgatgttggtggctctagcctcattctggagagaccactgtatgcttggcacgcaacggccggtgttgttctggcagcatcagtagctgcgttcgggtattggtacgggaggaggcgcagaaggtggtga

SEQ ID NO: 8814 - protein, 478 aa, Ricinus communis
MGRAFVYVILGGGVAAGYAALEFTRKGVSPGELCIISEEPVPPYERPALSKGYLLPEAPARLPSFHTCVGANEERLTPKWYKEHGIELVLGTRVKSADVRRKTLLTAAGETISYKILIIATGARALKLEEFGVNGSNAENVCYLRDVADADRLVNVMQSCTGGNAVIIGGGYIGMECAASLAINKMNVTMVFPEAHCMARLFTPKIASYYEDYYKCKGVQFIKGTVLSSLDMDSNGKVTAVNLRDGNRLPADIVVVGIGIRPNTSLFEGQLTLEKGGIKVNGRMQTSITSVYAVGDVASFPVKLFGETRRLEHVDSARKSARYAVAAIMEPNKTVDFDYLPFFYSRVFALSWQFYGDNAGEVVHFGDYSGSTIGAYWVSKGHLVGSFLEGGTKEEYEAIAKATRLKPAIEDTSDLERQGLGFALAVSENPVTSPPGDVGGSSLILERPLYAWHATAGVVLAASVAAFGYWYGRRRRRW

SEQ ID NO: 8815 - DNA, 1305 bp, Malus domestica
  CDS (1)..(1305)
atggcggcgaagaacttcaagtacgtcatcctcggcggcggagtctcggctggttatgcagctcgggagtttgccaagcaggggcttaagccaggcgaactagcagtcatttccaaagaggcggtggctccctacgaacgtcctgcactcagcaaggcttatctcttacccgagtctcctgctagacttcctgggtttcatgtctgcgttggaagtggaggagagagattgcttcctgactggtacaaggagaaagggatagaattgattcttagcactgaaatagttaaagcagatcttcctgggaagactcttgtcagtggaactggggaatccttcaagtatgagactctcgttattgccaccggctcaacggttataagattgtcagattttggtgtcaaaggagctgatgccaaaaacatcttctatttgagagaaattgatgatgccgataaactcaatgaagcaattaaagcaaaaaagaatgggaaggctgtgattgttggaggagggtacattggtctcgagcttggtgcagctttgagaattaacaatttagatgttaaaatggtttaccctgaaccatggtgcatgcctcggcttttcacttctgatattgctgctttttatgagggctattataaaaacaaaggagttcaaatcattaagggaacagttgcgactggatttactgctgactcaaatggagaggttaaggaagtgcacctaaaggatggcactgtgcttgaagctgacatcgttgttgttggtgttgggggcaggcccctgacaacattgttcaagggacaagtcgaagaggagaaaggcggcattaagactgatgcattcttcaaaacaagtgttccgaatgtgtatgctgtgggtgatgtcgccacttttcctttgaagttgtacaatgagattaggagagttgagcatgtcgaccatgcacgcaaatctgctgagcagtctgtaaaggccatcaaggcaagcgaggaggggaagacagttgaggagtatgactaccttccattcttctattcccgctccttcgatctttcatggcaattctacggtgacaatgttggtgaaactgtgctcttcggagacagtaatcctgccacaccaaaggcgaagtttggatcatactggattaaagacgggaaggtggtcggcgcatttctggagggcggcactccggaggagaacaaggctattgccaaagttgcaaaggcccaacctcctgttgccagtttagatcagcttgctacggaaggtctctctttcgctagtaagatttaa

SEQ ID NO: 8816 - protein, 434 aa, Malus domestica
MAAKNFKYVILGGGVSAGYAAREFAKQGLKPGELAVISKEAVAPYERPALSKAYLLPESPARLPGFHVCVGSGGERLLPDWYKEKGIELILSTEIVKADLPGKTLVSGTGESFKYETLVIATGSTVIRLSDFGVKGADAKNIFYLREIDDADKLNEAIKAKKNGKAVIVGGGYIGLELGAALRINNLDVKMVYPEPWCMPRLFTSDIAAFYEGYYKNKGVQIIKGTVATGFTADSNGEVKEVHLKDGTVLEADIVVVGVGGRPLTTLFKGQVEEEKGGIKTDAFFKTSVPNVYAVGDVATFPLKLYNEIRRVEHVDHARKSAEQSVKAIKASEEGKTVEEYDYLPFFYSRSFDLSWQFYGDNVGETVLFGDSNPATPKAKFGSYWIKDGKVVGAFLEGGTPEENKAIAKVAKAQPPVASLDQLATEGLSFASKI

SEQ ID NO: 8817 - DNA, 1302 bp, Zea mays
  CDS (1)..(1302)
atggctaggcacttcaagtacgtcatcctcggcggcggtgtcgcggcggggtacgcggcgagggagttcgccaagcagggcgtcaaccccggcgagctcgccatcatctccaaggaaccagtggccccttatgagcgccctgcactcagcaagggatacctcttccctcagaacgctgcaagactgccaggcttccacacgtgtgtgggcagcggtggagagagactacttcctgaatggtactctgagaaaggcattgaactgatcctgagtactgagattgtgaaggccgaccttgcttcaaagactctgaccagtgcagctgcggaaaccttcacatatgagaccttgctcattgctacgggctcctcggtcataaagctcactgattttggtgttcaaggagcagaatccaacaacatattgtatctaagggacattgcggatgccgacaagttggttgcagctatgcaggcaaagaagggtggaaaggctgtgattgttggaggtggttacatagggcttgagcttagcgctgccttgaaaatcaacaacttcgatgtgaccatggtgtaccctgaaccgtggtgcatgccccgtctcttcactgctggtattgctcatttctatgagggctactatgctaacaaaggaatcaaggttgtaaagggcacggttgctgttggtttcgacgctgatgccaacggagatgtcactacagtgaagttgaagaatggaagtgttctcgaagctgatattgttattgttggcgtcggcggcaggccattgacgcgtctcttcataggccaagctgctgacgagaaaggtggactcaagaccgatgcattcttcgaaacaagtgtagccggggtatacgcgatcggcgacgtggccaccttccctctgaagctctacaacgagcagaggagagttgagcacgtggaccacgcccggaagtccgccgagcaggccgtgagggcaatcaaggccaaggagtccggcgaatcggtggccgaatacgactacctgccctacttctactcccggtcgttcgacttggcgtggcagttctacggcgacaacgtcggcgacgacgtgctgttcggcgacaacgacccggcctcggccaagcccaagttcggcagctactgggtgaaggacggcaaggtcgtcggcgtgtttctcgagggcgggtcggccgaggagaaccaggccatcgccagggtcgccagggcgcagccgccggtggccgacgtccaggcgctgaagcaggaggggatcgatttcgcttccaaaatctga

SEQ ID NO: 8818 - protein, 433 aa, Zea mays
MARHFKYVILGGGVAAGYAAREFAKQGVNPGELAIISKEPVAPYERPALSKGYLFPQNAARLPGFHTCVGSGGERLLPEWYSEKGIELILSTEIVKADLASKTLTSAAAETFTYETLLIATGSSVIKLTDFGVQGAESNNILYLRDIADADKLVAAMQAKKGGKAVIVGGGYIGLELSAALKINNFDVTMVYPEPWCMPRLFTAGIAHFYEGYYANKGIKVVKGTVAVGFDADANGDVTTVKLKNGSVLEADIVIVGVGGRPLTRLFIGQAADEKGGLKTDAFFETSVAGVYAIGDVATFPLKLYNEQRRVEHVDHARKSAEQAVRAIKAKESGESVAEYDYLPYFYSRSFDLAWQFYGDNVGDDVLFGDNDPASAKPKFGSYWVKDGKVVGVFLEGGSAEENQAIARVARAQPPVADVQALKQEGIDFASKI

SEQ ID NO: 8819 - DNA, 1305 bp, Picea sitchensis
  CDS (1)..(1305)
atggctgaaaagttttttaagtacgttattgtgggtggtggcgttgcagctggatatgcagccagagaatttgtcaagttgggtctcaaatctggagagcttgcaattatatcgaaagaggctgtagctccatatgaaagacctgcacttagcaaggcttatctctttcccgaaggagctgcgcgactaccaggcttccatgtctgtgttgggattggaggagagaggcagctcccagagtggtatagtgagaaaggtatagagctaattcttagcactgaagtggtgaaagctgaaattgcctccaaaactctcactaccgcagaagggacaactttcaaatatgacactttgatcattgcaactggttccactgttatcaagttatccgactttggtgtgcaaggagctgacgccaagggcatcttttatctgagagagattgccgaagctgatgccttggtatcagcaatacagtcaaaaccagaaggcacagctgtgattgttggtggaggatatattggccttgaactggctgcggtcttaagaatcaacaagtataaagttaaaatggtttaccctgagccatggtgcatgcctcgtcttttcactgcagatatagctgctttctatgagggctattatagaggaaagggtgtggaaataattaaaggaacagtggccacaggatttgtcacggatgagcatgaaaatgttaagatagtaaagttgaaggatggcagggaacttgaggcagacattgttgttgttggtgttggaggaagacctttaacaggacttttcaaaggacagctcgaggaagaaaagggaggcattaagacggatggtttcttcaaaactagtgttcctgacgtttatgcagtaggagacgtggcaactttcccaatgaagatttatggggatattagaagagtcgagcatgtcgatcatgctaggaaatcagcagcgcaagccgtgcaggcaattaaagcgaaagaagaaggaaagagctttgaagaatatgattaccttccatatttctattcacgttcattcgatttgtcatggcaattctatggagacaacgtaggtaaagccattattttcggtgacaataaccctgctacaccaaaagccaaatttggttcatattggataaaagatggcagggtggtaggtgtattcttggagaatggtactcctgaagaaaacaaagccattgctaaggtagcacgtttgaagcctttggtcgaaagcaaggaggaactcataaaggatgggctggcatttgcttctaagatatga

SEQ ID NO: 8820 - protein, 434 aa, Picea sitchensis
MAEKFFKYVIVGGGVAAGYAAREFVKLGLKSGELAIISKEAVAPYERPALSKAYLFPEGAARLPGFHVCVGIGGERQLPEWYSEKGIELILSTEVVKAEIASKTLTTAEGTTFKYDTLIIATGSTVIKLSDFGVQGADAKGIFYLREIAEADALVSAIQSKPEGTAVIVGGGYIGLELAAVLRINKYKVKMVYPEPWCMPRLFTADIAAFYEGYYRGKGVEIIKGTVATGFVTDEHENVKIVKLKDGRELEADIVVVGVGGRPLTGLFKGQLEEEKGGIKTDGFFKTSVPDVYAVGDVATFPMKIYGDIRRVEHVDHARKSAAQAVQAIKAKEEGKSFEEYDYLPYFYSRSFDLSWQFYGDNVGKAIIFGDNNPATPKAKFGSYWIKDGRVVGVFLENGTPEENKAIAKVARLKPLVESKEELIKDGLAFASKI

SEQ ID NO: 8821 - DNA, 1344 bp, Micromonas sp. RCC299
  CDS (1)..(1344)
atggccacccgaatcgccaagaagatcgtcgtcgtgggcggcggcaacagcgccggctacttcgcccgcgccgtcgtcgccgccggccgcggcgccgacctcaccgtgatcagcgccgaggacgtcctcccgtacgagcgccccgcgctgacgaaggctttcctcaacgagaccgggcccgcgcgcctcccggggttccacacgtccgtcggcggcggcggcgagcgacagaaccaggagtggtacgacgccaacggcgtcgaggtccacctcggcaccagggtggtctcctgggacgccgcgtccaagacggtcaccaccgacacgtccgcctcgttcggctacgagaagctcatcgtcgccatcgggtgcaccgcgctcaagctcccggcgtccatgggcggcgacctcccgggcgtacactacgtcagggaccacgcggatgcgctcgcgctctacgacgccatgtccaaggcccgcgcacccgtggtcatcggcgggggctacatcggactcgaagccgccgccgcgttcgccgctcgcggcgccaaacccgccgtcgtcatgatggaaccccacgtgatggcgcgcctctggaccccgacgatcgcggcgcactacgaaacgctgtacgagtccaaggggtgcgtctttcacaagaacgccaaggtgagcgccatcgcgcggggcgaagacggccgagtcgaatcggtcgagttggaagggggcgtcaccttgcccgcggatctcgtcgtggtcggcgtcggcgcaggcgccgtcaccgccccgttcgacgccctggacaccaccccggacgccaggaacccgggtggtatcctcgtggaccacacgttcgccgcgtccggggttaacgtcgagcccaaatccgtgtacgccatcggcgacgtcgccgcgtttccgctcgcgttcgacgataaccaaacggttcgcatggagcacgtcgcgcacgctcgcgcctccgcggcgcactgcgcgcggtgcatcctcgccgcggacgacgacgacacacaaacggcgaacgctccgtaccgatacacgccttacttttacagcagggtgttcgaacagtcggactcgactcgcaaagtcgcgtgggtgttttacgggttgcagcgaggcgacgtcgtctgcgtcggcgatttcgcgcccaagctcgcggcgttttgggtgaacgagggcgtctgcgtcggcgccatgctcgagagcggcacccccgacgaggtcaaggccgtgcaggccatcgccgagggtaggccgtccgtggacgtcgagaagctccgggcgtgcgccaccgcggaggcggcgctggcactctttgcgtga

SEQ ID NO: 8822 - protein, 447 aa, Micromonas sp. RCC299
MATRIAKKIVVVGGGNSAGYFARAVVAAGRGADLTVISAEDVLPYERPALTKAFLNETGPARLPGFHTSVGGGGERQNQEWYDANGVEVHLGTRVVSWDAASKTVTTDTSASFGYEKLIVAIGCTALKLPASMGGDLPGVHYVRDHADALALYDAMSKARAPVVIGGGYIGLEAAAAFAARGAKPAVVMMEPHVMARLWTPTIAAHYETLYESKGCVFHKNAKVSAIARGEDGRVESVELEGGVTLPADLVVVGVGAGAVTAPFDALDTTPDARNPGGILVDHTFAASGVNVEPKSVYAIGDVAAFPLAFDDNQTVRMEHVAHARASAAHCARCILAADDDDTQTANAPYRYTPYFYSRVFEQSDSTRKVAWVFYGLQRGDVVCVGDFAPKLAAFWVNEGVCVGAMLESGTPDEVKAVQAIAEGRPSVDVEKLRACATAEAALALFA

SEQ ID NO: 8823 - DNA, 1401 bp, Micromonas pusilla CCMP1545
  CDS (1)..(1401)
atgtccgcgatcgcgaagaagatcgtcctcgtcggcggcggcaacgccgcgggctacttcgctcgcgcggtcgtggccgcgggaagaggcgcggagctcacgatgatcgcggccgagaacgtcctcccgtacgagcgccccgcgctcacgaaggcgttccttcacgcggagtcccccgcgcgcctgcccgggttccacaccagcgtcggcggcggcggcgagcggcagaccgcggagtggtacgcgacgcacggcgtggaggtcatcctagggacgcgcgtcgtggacgcgaacctcgaagaaaagaccgtcgtcaccgacgcggggaagtcgtactcgtacgataagctcgtcgtcgcgatcggctgcaccgcgctgaagctcccgagcgcgatcggcggcgacctcccgggcgtgcaccgcgtccgcgacgtcgcggacgcgctcgcgctgtgcgacgcgatggacggctgcgcgaaggggtccgtcgtcatcggcggagggtacgtcggattggaagtcgccgccgcgttggcgacgcgcgggctctcgccgcgcgtcgtgatgatggaaccgcatatcatgtccaggctgtggacgcgcgagatcgcggagaagtacgagaagctgtacgaagccaaggggacgacgtttcatcgcggcgcgaaggttgccaaaatcatcgcgggcgacgacggccgcgccgccggcgtcgagctcgacggcggcgcgacgctcgagtgcgacgtcgtcgtcgtcggcgtcggcgcgggcgcgccgatcgagccgttcgcgcggctcgccgccgcgcccgcgccgacggggggcatcgccgtcgacggcacgttcgccgcgtccggcgaggggatcgaaccgaagagcgtgtacgccatcggcgacgtcgccgcgtttccgctgaaacgcgccggcggcgcgctcaggcgcgttctattgcacactggtccccatacgaccgctcggatggaacacgtcgcgcacgcgcgcgcctccgccgcgcacgccgcgaaggctgtcctcgacccgtcgtccgcggagacgtacgactacctgccgtacttctacagccgggtgttcgagcacgccggcagcgagcggaaggtggcgtgggtgttttacggcgcgcagccagagggcgcggaggtggtggtcgtcggcgagctgcgcccgaagctcttcgccgcgtggatcgatccctcgggcgcgttctatatatctcagactgacgggacgacgctcgtcggcgcgatgctcgagagcggcgacggcgaggaggttgacgtcgtgaagtccgcggcggagaggtgcccgaaggtggacgtggacgcgctgaagaagtgcgcgaccgtggaggacgcgctcgcgctcgtcgcggcggcgtga

SEQ ID NO: 8824 - protein, 466 aa, Micromonas pusilla CCMP1545
MSAIAKKIVLVGGGNAAGYFARAVVAAGRGAELTMIAAENVLPYERPALTKAFLHAESPARLPGFHTSVGGGGERQTAEWYATHGVEVILGTRVVDANLEEKTVVTDAGKSYSYDKLVVAIGCTALKLPSAIGGDLPGVHRVRDVADALALCDAMDGCAKGSVVIGGGYVGLEVAAALATRGLSPRVVMMEPHIMSRLWTREIAEKYEKLYEAKGTTFHRGAKVAKIIAGDDGRAAGVELDGGATLECDVVVVGVGAGAPIEPFARLAAAPAPTGGIAVDGTFAASGEGIEPKSVYAIGDVAAFPLKRAGGALRRVLLHTGPHTTARMEHVAHARASAAHAAKAVLDPSSAETYDYLPYFYSRVFEHAGSERKVAWVFYGAQPEGAEVVVVGELRPKLFAAWIDPSGAFYISQTDGTTLVGAMLESGDGEEVDVVKSAAERCPKVDVDALKKCATVEDALALVAAA

SEQ ID NO: 8825 - DNA, 1308 bp, Ostreococcus tauri
  CDS (1)..(1308)
atgtctcgaccgatcgtcgttgtcggcgccggtaacgccgccggttacctcgtgcgcgctctcgtcgccgctgatcccgcgctcggtgccaaaactctcgttctcggcgccgaggacgtcgctccttacgagcgtccggcgctcacgaaagcgtttttacacgaacaaacgccaccgcgattacccggattccacacgtgcgtgggcggtggcttcgatcgacaaacgcccgagtggtacgccgagagcggggtggaattgaagctgaactcgacggtgacgagcgcggatttcaaggcgaaaacggtgaccacggcgggcggtgagtcttttgcgtacgagaccttggtggttgccacgggatgcggcgtgatcagacttccagagtccatcgggggtggactccgaggggtgcactacgtgcggaacaactcggatgcgttggcgctcacagaggcgatgtcaaaagctaagaagtgcgtcgtcatcggcggtggttacatcggtttagaggtcgccgcgtcgtgtgcgacgcgcggattgaaccctgagattatcatgatggagccgcactgcatggcgaggctttggaacggagatattgcaaagtactacgaggctttgtacgaagccaagggcgcaaggtttcatcgtgagagcaaggtgaaacggattctggcggacgacgcaacgggcgcggcgagaggtgttgagctcgagagcggcgtagtgatcgattgcgatttggttgttgtcggcatcggcgctactgcgccgttgccgttcgcaggattggatgctcccgagggacgtctcggcggcgtcaaggttgactctcgattccgagcgtccggagccgacatcgctccgggtagtgtctacgccgtcggcgacatcgcggctttcccgctcaagatgacgaatgagatcgtgagaatggagcacgtcaagcacgcgcgggacagcgcgacgctcgtcggtaacctgatcgctggcaagacggacgccgaatacgattacacccccttcttttacagccgtgtgttcgagcaccccggcaccgaacgcgccgtgagctgggtcttccatggcttgcaacgcggcgagatcatcaccgtcggtgatttcaaccctaagctcgccgcattttgggtcgaaaactcaaagtgcgtcggcgtcatgctcgaatccggcgccccggagcaaaactccgccctcgccgccgcgacgcgttcgggtaaatccatcgacgtcgacgccctccgcgccgccgcatccgccgacgacgccatcgcgctcatcctttaa

SEQ ID NO: 8826 - protein, 435 aa, Ostreococcus tauri
MSRPIVVVGAGNAAGYLVRALVAADPALGAKTLVLGAEDVAPYERPALTKAFLHEQTPPRLPGFHTCVGGGFDRQTPEWYAESGVELKLNSTVTSADFKAKTVTTAGGESFAYETLVVATGCGVIRLPESIGGGLRGVHYVRNNSDALALTEAMSKAKKCVVIGGGYIGLEVAASCATRGLNPEIIMMEPHCMARLWNGDIAKYYEALYEAKGARFHRESKVKRILADDATGAARGVELESGVVIDCDLVVVGIGATAPLPFAGLDAPEGRLGGVKVDSRFRASGADIAPGSVYAVGDIAAFPLKMTNEIVRMEHVKHARDSATLVGNLIAGKTDAEYDYTPFFYSRVFEHPGTERAVSWVFHGLQRGEIITVGDFNPKLAAFWVENSKCVGVMLESGAPEQNSALAAATRSGKSIDVDALRAAASADDAIALIL

SEQ ID NO: 8827 - DNA, 1305 bp, Rheum australe
  CDS (1)..(1305)
atggcggagaagcacttcaaatacgtcatccttggtggtggcgttgcggctggttatgctgcccgtgagtttgccaaacagggtgtccaaccaggagagcttgctattatttctaaagaggctgtggctccatatgaacgaccagcactcagcaaggcatacctctttcctgaaggtgctgccagacttccaggatttcacacgtgtgttggaagtggaggagagagacttcttcctgaatggtacaaggagaaaggtatagaacttattctcagtacagaaatagtcacagctgatcttgcttccaagactctcacaagtgcagctggagaagttttcaagtatcacatcttgattattgctaccggttcttctgtcataaagttgactgacttcaaggtacaaggagctgatgctaagaacattctctacttgagagagatagacgatgctgataaacttgtggaagctattaaagagaagaagggcgggaaagttgttattgttgggggaggctatataggtcttgaacttagtgcagtaatgctactcaacaagttggatgttactatggtgtatcctgagccctggtgcatgcctcgtctcttcactgctgatatagctgctttctatgagggttattatgctaataagggtgtcaaaatcataaagggaactttggctgttggctttgagtcccatgctaatggagaggtgaaggtagttaaactgaaggatggacgagagcttgaagctgacatagttgttgttggtgttggtgcaaggccactcaagaatctgttcaaagggcaacttgaagaggacaagggtggaattaagactgatgcattcttcagaacaagtgttccagatgtttatactgttggtgacgttgctaccttccccatgaaaatgtatggtgatatcagaagagtagaacatgtcgaccactcccgtaaatctgctgagcaggctgttaaggccatcaaggcaagtgaagtgggcgaagcaattgaggaatatgactaccttccctacttctactcccgttccttcgatctgtcatggcagttctacggcgacaatgtaggagatgccgtgatatttggagacagcagtcctgagtccgagaaaccgaagtttggcttctactggattaaagacgggaaagtggtgggagttttcctggagagtggaaccccagaagagaacaaagccatagctaaggttgctaagctccaaccaccagctgagagcttggaacagcttgcaaatgaaggcttaggctttgcctccaaaatctaa

SEQ ID NO: 8828 - protein, 434 aa, Rheum australe
MAEKHFKYVILGGGVAAGYAAREFAKQGVQPGELAIISKEAVAPYERPALSKAYLFPEGAARLPGFHTCVGSGGERLLPEWYKEKGIELILSTEIVTADLASKTLTSAAGEVFKYHILIIATGSSVIKLTDFKVQGADAKNILYLREIDDADKLVEAIKEKKGGKVVIVGGGYIGLELSAVMLLNKLDVTMVYPEPWCMPRLFTADIAAFYEGYYANKGVKIIKGTLAVGFESHANGEVKVVKLKDGRELEADIVVVGVGARPLKNLFKGQLEEDKGGIKTDAFFRTSVPDVYTVGDVATFPMKMYGDIRRVEHVDHSRKSAEQAVKAIKASEVGEAIEEYDYLPYFYSRSFDLSWQFYGDNVGDAVIFGDSSPESEKPKFGFYWIKDGKVVGVFLESGTPEENKAIAKVAKLQPPAESLEQLANEGLGFASKI

SEQ ID NO: 8829 - DNA, 1449 bp, Solanum lycopersicum
  CDS (1)..(1449)
atggcgactacgcctaatacgatgtcgattaagcaaggtctttcactctggtgtcctcaatcagctgtgttgaatcggatttcaagggtttcggttccttctagaagcttcaggagaagtttcgttgctgcttcatcatttgataatgagaatcgagagtatgtggtagttggaggaggaaatgcagctggatatgctgctagaacttttgttgagcatggacaagctaatggaaagttatgcattgtgaccaaagagccatatgcaccatatgaacgtccagcattgaccaaagcatacttgtttcctctggacaaaaagccagcacgtttaccgggctttcatacttgtgttggcgctggtggtgagaggcaaacacctgattggtacaaggaacaagggatagagatgttgtatgaagatccagtaacaggaattgatatagaaaagcaaactctgacaacaaattcaggaaagctgctcaagtatggcacccttattattgcaaccggatgtacggcatccagatttcctgagaagatcggaggaaatttacctggggttcactatattcgggatgtggcagatgctgattcattaatatcctcactggggaaagcaaaaaaacttgtagttgttggtggtggttatataggaatggaagttgctgcagctgccgtagcctggaaacttgatacaactataatttttccagaagagcatctcttatcaagactgttcactccttctcttgcccaaaagtatgaacaactctaccaagacagtggtgtcaaattcgtcaagggtgctaagataaaacatctagaatctggtccagatagccgggtaactgcagttaagcttgaagatggatcaagtatagagacagacacggttgttattggtattggagcaaaacctgccgtcagtccatttgacatggttggcttaaacaacactgtcggtggaatagaggttgacggacagttccgaacaaacatacctggaatctttgccattggagatgttgccgcatttccattgaagatatacaaccgaattgcacgggtggagcacgttgaccatgctcgtaaatctgcacagcattgtattaaatcattgctaactgcacacacgcacacgtatgactatttaccatatttctactcaagggtttttgaatatgaaggaagctctaggaaagtatggtggcaattctttggtgacaatgttggggaggccgttgaagttgggaattttgatccaaaggttgcaacattttggatcgactctggtaagctgaagggggttcttcttgaaagtgggagtcctgaggaattccaactgcttccaaaacttgcacgaagccagccctctgttgacatagccaaacttcaaaatgcatcgtcggttgaagaggctctagaaattgctcaagcttccttgtag

SEQ ID NO: 8830 - protein, 482 aa, Solanum lycopersicum
MATTPNTMSIKQGLSLWCPQSAVLNRISRVSVPSRSFRRSFVAASSFDNENREYVVVGGGNAAGYAARTFVEHGQANGKLCIVTKEPYAPYERPALTKAYLFPLDKKPARLPGFHTCVGAGGERQTPDWYKEQGIEMLYEDPVTGIDIEKQTLTTNSGKLLKYGTLIIATGCTASRFPEKIGGNLPGVHYIRDVADADSLISSLGKAKKLVVVGGGYIGMEVAAAAVAWKLDTTIIFPEEHLLSRLFTPSLAQKYEQLYQDSGVKFVKGAKIKHLESGPDSRVTAVKLEDGSSIETDTVVIGIGAKPAVSPFDMVGLNNTVGGIEVDGQFRTNIPGIFAIGDVAAFPLKIYNRIARVEHVDHARKSAQHCIKSLLTAHTHTYDYLPYFYSRVFEYEGSSRKVWWQFFGDNVGEAVEVGNFDPKVATFWIDSGKLKGVLLESGSPEEFQLLPKLARSQPSVDIAKLQNASSVEEALEIAQASL

SEQ ID NO: 8831 - DNA, 1302 bp, Pisum sativum
  CDS (1)..(1302)
atggtgcattcgttcaagtatatcctcattggaggaggagtttcagctgggtatgcagcaagggagtttgtgaaacaaggagttcatcctggggagcttgcaattatatctaaagaagcggtagcaccttatgaacgtcctgctctgagcaaggcttacctttttccagagtctcctgctaggcttcctgggttccatacctgtgttggaagtgggggagaaagattgcttccagagtggtacagtgagaaagggatacagctgtatctcagtacagaaattgtaagtgcagatcttgctgcaaaatttctgaaaagtgcaaacggagaacacttcgattaccagactttggttatcgcaacaggctcagctgttataaggttgacagatttcggtgtaataggagctaatgccaaaaacatattttaccttagggaggttgatgatgctgacaaattgtacgaggcaatcaaaagaaagaagaatgcgaaagctgtggttgttggaggaggatacattggtctggagttgagtgcagttttgaaactcaatgatcttgatgttaccatggtctacccagaaccttggtgtatgccacgactttttacttctgaaattgctgctttctatgagggatattatgccaataaagggatcaatatcattaaagggacagttgctgttggattcactgccaactccgatggagaggtaaaagaagtcaaactaaaggatggtagggtcctggaagcagatattgtcattgttggtgttggaggaaggcctcaaatatccttattcaaagggcaggttgaagagcagcatggtggaatcaagactgattccttcttcaaaacaagtgttcctgatgtatatgccgttggtgatgttgctacgttccctttgaaattgtacaatgacgtgagaagagttgaacacgttgatcatgctcgcaaatcagctgagcaggctgcaaaggtaatctttgcagcagatgtacgaaaatcagttgaagagtatgattaccttccatacttctattcccgttcgtttgatctgtcctggcaattctatggcgacaatgttggtgagacagtgctatttggagacaacgatcctgcatcatcaaagcctaaatttgggacatactggattaaagaagggaaagttgttggggcctttttggagggtggaactcctgatgagaataaagctattgccaaagttgcaagagccaagcctgcagtggaggatgtgaatcaacttgcagaggaaggcctttcttttgcaagtaaaatttaa

SEQ ID NO: 8832 - protein, 433 aa, Pisum sativum
MVHSFKYILIGGGVSAGYAAREFVKQGVHPGELAIISKEAVAPYERPALSKAYLFPESPARLPGFHTCVGSGGERLLPEWYSEKGIQLYLSTEIVSADLAAKFLKSANGEHFDYQTLVIATGSAVIRLTDFGVIGANAKNIFYLREVDDADKLYEAIKRKKNAKAVVVGGGYIGLELSAVLKLNDLDVTMVYPEPWCMPRLFTSEIAAFYEGYYANKGINIIKGTVAVGFTANSDGEVKEVKLKDGRVLEADIVIVGVGGRPQISLFKGQVEEQHGGIKTDSFFKTSVPDVYAVGDVATFPLKLYNDVRRVEHVDHARKSAEQAAKVIFAADVRKSVEEYDYLPYFYSRSFDLSWQFYGDNVGETVLFGDNDPASSKPKFGTYWIKEGKVVGAFLEGGTPDENKAIAKVARAKPAVEDVNQLAEEGLSFASKI

SEQ ID NO: 8833 - DNA, 1305 bp, Brassica oleracea
  CDS (1)..(1305)
atggcggagaagagcttcaaatacatcatcctcggcggcggagtctcggccggatacgcagctaaggagtttgctaatcaaggggttaagccaggagaattggctgttatctccaaagaggccgtggctccatatgaacgccctgcacttagcaaggggtatctgtttcctgaaggggctgctagacttccaggtttccattgctgtgttggcagcggtggagaaaaactgcttcctgaatcctacaaacagaaagggattgagttgatactgagcacagaaatagtgaaagcagatctcgctgccaagactcttgtcagtgcagctggggatgtcttcaaatacgagactctcataattgcaactggctctactgttctcagattgactgattttggagtaaaaggtgcagactctacgaacatcctctatctgagagagattgatgatgccgacaaagtggttgaagcaattaaagcaaagaaaggcgggaaggctgtagttgttggtggaggttacattggtcttgagcttagttcagctttgaggatcaacgattttgatgtcactatggttttccctgaaccttggtgcatgcccaggcttttcaccgctgatattgctgctttctatgagacatactacacaaacaagggagtgaagatcattaagggaacggtggcatctggtttcaccgctcatccaaatggagaggtgaatgaagtacaactcaaggatgggaggtcactggaagccgacattgtgatagtcggagttggtgcgaaaccattgacatccttattcaagggacaggtggaggaagacaaaggtggaattaagaccgatgccttcttcaaaacaagtgtccctgatgtttacgctgttggtgacgttgctactttccccttgaaaatgtatggagacatgagaagggtcgagcatgttgaccattctcgcaaatccgcagagcaagctgttaaggcgatcaaagcggctgagggaggcggaacggtggaggaatacgactatctcccattcttctactcgcgctcctttgatctctcatggcagttctatggagacaacgtaggagactctgtcttatttggagacagcaatccatcaaacccaaaaccaagatttggagcgtactggatccaagatggtaaagtggttggagcattcatggaaggaggttgtggtgacgagaacaaagccttggctaaagtcgccaaagctcgacctgttgcagagagccttgacgagctggccaaacaaggcatctccttcgctgctaagatttga

SEQ ID NO: 8834 - protein, 434 aa, Brassica oleracea
MAEKSFKYIILGGGVSAGYAAKEFANQGVKPGELAVISKEAVAPYERPALSKGYLFPEGAARLPGFHCCVGSGGEKLLPESYKQKGIELILSTEIVKADLAAKTLVSAAGDVFKYETLIIATGSTVLRLTDFGVKGADSTNILYLREIDDADKVVEAIKAKKGGKAVVVGGGYIGLELSSALRINDFDVTMVFPEPWCMPRLFTADIAAFYETYYTNKGVKIIKGTVASGFTAHPNGEVNEVQLKDGRSLEADIVIVGVGAKPLTSLFKGQVEEDKGGIKTDAFFKTSVPDVYAVGDVATFPLKMYGDMRRVEHVDHSRKSAEQAVKAIKAAEGGGTVEEYDYLPFFYSRSFDLSWQFYGDNVGDSVLFGDSNPSNPKPRFGAYWIQDGKVVGAFMEGGCGDENKALAKVAKARPVAESLDELAKQGISFAAKI

SEQ ID NO: 8835 - DNA, 1461 bp, Brassica oleracea
  CDS (1)..(1461)
atggcgttagcatccaccacgttgccagcgaagaccggattgtctctttggtgtcccacttctccctccctcgctcgccgtcttcccgctcggttttctccgattggttccagaatcgcctccagaggcgtcgtcactgcttccttcgccaacgagaatcgcgagtttgtgataattgggggaggaaatgcggcggggtatgcagctaggacctttgtagaaaacggaatggccgatggtcgcctttgtattgtcaccaaagaggcttacgcgccttatgagagacctgccttgacaaaagcttacttgttccctccagagaagaagcctgctcgtcttccagggtttcatacttgtgttggaggtggtggagagaggcaaacaccagattggtacaaggagaaagggattgagatgatatatgaagatccagtgactggagctgattttgaaaagcaaaccctcacgacaaacacagggaagcagttaaaatatggatccctgattatcgctacagggtgtacagcctctaggttcccagataaaattggtggaaacttgcctggggttcactatattcgggaggttgcagatgctgattcacttatttcatctctgggaaagtcaaagaaagttgtcattgttggtggtggctacatcggcatggaggttgctgctgcagctgttgcgtggaacctagatacaacgattgtattccccgaagatcagcttttgcaaagattgttcactccatcacttgctcagagatacgaagagctataccgtcaaaatggtgttaagtttgtcaagggcgcttcgataaataacttagaagctggttcggatgggcgtgtaacagctgttaagcttgctgatggatctacaattgaggcagacacggttgtgatcggaattggagctaagcctgctattggcccctttgaaactttgtccatgaacaaatctattggaggcattcaggttgatggcttgttcagaacaagtacccctggaattttcgctattggagatgtggcagccttccctttaaagatatatgatcggatgacccgagttgaacatgttgatcacgcccgccgttctgcacaacactgcgtgaaatctctgctcactgcacacactgacacttatgattatctcccgtacttctactcaagagtattcgagtatgaaggcagctcaagaaaagtctggtggcagttttatggggataatgtgggagaaacagttgaagttggcaacttcgatcccaagatcgctaccttctggattgattctggcaggttgaaaggtgttcttgtagaaagtggttctccagaggagtttcagcttctcccaaagctagcaagaagtcaaccaattgtcgataaggctaaactcgccagcgcatcttcagtggaagaagccatcgagattgctcaagccgctctacagagttaa

SEQ ID NO: 8836 - protein, 486 aa, Brassica oleracea
MALASTTLPAKTGLSLWCPTSPSLARRLPARFSPIGSRIASRGVVTASFANENREFVIIGGGNAAGYAARTFVENGMADGRLCIVTKEAYAPYERPALTKAYLFPPEKKPARLPGFHTCVGGGGERQTPDWYKEKGIEMIYEDPVTGADFEKQTLTTNTGKQLKYGSLIIATGCTASRFPDKIGGNLPGVHYIREVADADSLISSLGKSKKVVIVGGGYIGMEVAAAAVAWNLDTTIVFPEDQLLQRLFTPSLAQRYEELYRQNGVKFVKGASINNLEAGSDGRVTAVKLADGSTIEADTVVIGIGAKPAIGPFETLSMNKSIGGIQVDGLFRTSTPGIFAIGDVAAFPLKIYDRMTRVEHVDHARRSAQHCVKSLLTAHTDTYDYLPYFYSRVFEYEGSSRKVWWQFYGDNVGETVEVGNFDPKIATFWIDSGRLKGVLVESGSPEEFQLLPKLARSQPIVDKAKLASASSVEEAIEIAQAALQS

SEQ ID NO: 8837 - DNA, 1305 bp, Brassica rapa subsp. pekinensis
  CDS (1)..(1305)
atggcggagaagagcttcaagtacatcatcctcggcggcggcgtctcagccggatacgcagctaaggagtttgctagtcaaggagttaaaccaggggaattggcagttatctccaaagaggcggtggctccttatgaacgtcctgctcttagcaagggctatttgtttcctgaaggggcggctagactcccaggtttccattgctgtgttggtagtggtggagaaaaactgcttcctgaatcatacaaacagaaagggattgagttgatactaagcacggagatagtgaaagcagatctcgctgccaagagtcttgtcagtgcagctggggatgtcttcaaatatgagactctcataattgcaactggctctactgttctgagattgactgattttggtgtgaaaggtgctgactctaagaatatcctctatctgagggagattgatgatgcagacaaagtggttgaagctattcaagcaaagaaaggtggaaaggctgtggttgttggtggaggctacattggtcttgagcttagtgcagctttaaggatcaacaattttgatgtcactatggttttccctgaaccctggtgcatgcctaggcttttcaccgccgacattgctgcgttctatgagacttactatacaaacaagggagtgaagatcattaaaggaactgtggcatctgggttcacagcacatccaaatggagaggtgaatgaagtacaactcaaggatggaaggtcgctagaagccgacattgtgatagttggagttggtgcaagaccattaacagccttattcaagggacaggtcgaagaagacaaaggtggaatcaagaccgatgcattcttcaaaacaagtgttcctgatgtttacgctgttggtgacgttgccactttccccttgaaaatgtatggagacatgagaagggtcgagcatgttgaccattctcgcaaatccgcagagcaagctgttaaggcgatcaaagcggctgagggaggcggagcggtggaggaatacgactacctcccattcttctactcccgctcgtttgatctctcatggcagttctatggagacaacgtaggagactctgtcttgtttggagacagcaatccatcaaacccgaaaccaagatttggagcgtattgggttcaagatggtaaagtggttggagcattcatggaaggaggtagtggtgacgagaacaaagccttggcgaaagtggccaaagctagacctgctgcagagagcctcgaggatcttaccaaacaaggcatctcatttgctgctaagatctga

SEQ ID NO: 8838 - protein, 434 aa, Brassica rapa subsp. pekinensis
MAEKSFKYIILGGGVSAGYAAKEFASQGVKPGELAVISKEAVAPYERPALSKGYLFPEGAARLPGFHCCVGSGGEKLLPESYKQKGIELILSTEIVKADLAAKSLVSAAGDVFKYETLIIATGSTVLRLTDFGVKGADSKNILYLREIDDADKVVEAIQAKKGGKAVVVGGGYIGLELSAALRINNFDVTMVFPEPWCMPRLFTADIAAFYETYYTNKGVKIIKGTVASGFTAHPNGEVNEVQLKDGRSLEADIVIVGVGARPLTALFKGQVEEDKGGIKTDAFFKTSVPDVYAVGDVATFPLKMYGDMRRVEHVDHSRKSAEQAVKAIKAAEGGGAVEEYDYLPFFYSRSFDLSWQFYGDNVGDSVLFGDSNPSNPKPRFGAYWVQDGKVVGAFMEGGSGDENKALAKVAKARPAAESLEDLTKQGISFAAKI

SEQ ID NO: 8839 - DNA, 1434 bp, Mesembryanthemum crystallinum
  CDS (1)..(1434)
atgcgcccaacaaccaatcccaatatcgcagctcctccgattttctctctcttctctctctgtctcgctctcagctgctcattctttgcgcttcgcttcatcgatcgaaggtccactaactccatttcaatggcggaaaagcactttaagtacatcgctcttggtggtggcgtttccggtggatatgccgcaagagagtttgctaagcagggtgtccaaccaggcgagttagcaatcatttctaaagaagcggtggccccttatgaacgtccggcacttagcaaggcatacctctttccagagggtactgctagacttcctggattccatgtttgtgtaggaagcggaggggagagacttgttcctgactggtataaggagaaaggtatagagttgattctgagcacagaaatagtcaaagctgatctttcttcaaagtctctcacaagtgctagtggagaaatatttaaatatgacaacttggtcatagcaactggttctacagtcataaaattgtcagattttggtgtccaaggggctgatgctaaaaacatcttctatcttagagaaattgatgatgctgataagcttgtggaagcaatcaaaactaagaagaatggaaaagttgtgttggttggtggaggttacattgggcttgagcttagtgcagcaatgagagtcaatgatttggatgtcactatggtttacccagagccctggtgcatgccacgactcttcactgctgatatagcaaagttctatgagggttactacactaacaagggagtcaaaattataaaaggaacagtagcggctggattcagctcccatgataatggagaggtgaaagaagtgcagctaaaggatggtagggttctggcagctgatattgtggtggttggcgttggtggaaggcctcttacagctctgttcaagggtcaggttgcagaggaaaaaggaggaattaagactgatggattctttaaaacaagcgtcccagatgtatatgctgttggtgatgtagccacctttccactgaaattgtatggtgaactgagaagagttgaacatgtcgaccatgcccgtaaatctgcagaacaggctgtgaaggctatcaaagctagtgaggagggaaaagcagttgaggaatatgactacctaccatacttctattctcgtgctttcgatctatcttggcagttttatggggataatgttggagatgccgttctatttggtgataatgaccctgcatcatcaccacacaagtttggttcgtactggatcaaagatgggaaggttgtaggagcattcctagagagcggaaccccagaagagaacaaggccatagcaaaggttgctcgagtccagcccccggctgacagcttggagcagctgtcgaaagaaggactcacctttgcctccaagatctga

SEQ ID NO: 8840 - protein, 477 aa, Mesembryanthemum crystallinum
MRPTTNPNIAAPPIFSLFSLCLALSCSFFALRFIDRRSTNSISMAEKHFKYIALGGGVSGGYAAREFAKQGVQPGELAIISKEAVAPYERPALSKAYLFPEGTARLPGFHVCVGSGGERLVPDWYKEKGIELILSTEIVKADLSSKSLTSASGEIFKYDNLVIATGSTVIKLSDFGVQGADAKNIFYLREIDDADKLVEAIKTKKNGKVVLVGGGYIGLELSAAMRVNDLDVTMVYPEPWCMPRLFTADIAKFYEGYYTNKGVKIIKGTVAAGFSSHDNGEVKEVQLKDGRVLAADIVVVGVGGRPLTALFKGQVAEEKGGIKTDGFFKTSVPDVYAVGDVATFPLKLYGELRRVEHVDHARKSAEQAVKAIKASEEGKAVEEYDYLPYFYSRAFDLSWQFYGDNVGDAVLFGDNDPASSPHKFGSYWIKDGKVVGAFLESGTPEENKAIAKVARVQPPADSLEQLSKEGLTFASKI

SEQ ID NO: 8841 - DNA, 1494 bp, Spinacia oleracea
  CDS (1)..(1494)
atgtcaacagttggaagattcatggcgaccatgtcaaattcactctcactcaaacatggcgtctcactttactcttctacttcttcctcattttctctttccaaactccactgtaaaccttcacttgtcgcttctagacccttctacaatcgtcgatgtttctcaatctctgcttcttccagtttcgccaacgacaatcgagagtatgtgatcgttggaggtgggaatgcggcggggtacgcagctcggacatttgttgaacatggattggctgatggcaagctctgcattgttactaaagaggcatacgcaccatatgagcgtccagctttgacgaagggctacttgtttccattggataagaagcctgcacgactaccaggttttcatacttgtgttggaggtggtggtgaaaggcagactccggaatggtaccaggagaaaggaattgagatgatttacgaggacgcagtgacaggtgttgatatagagaagcatactctacaaactcagtcaggcaaatcgcttaagtatggttcacttatagtggcaacaggctgcacagctacaaggtttccggagaagattggcggtaacttacccggtgtgcactatgttcgagatgtggcagatgctgactcccttatagagtcattgaagaaagcaaagaaggtggtgattgtgggcggtggctatattggcatggaagttgctgctgcagctgtgggttggaaccttgataccacggtcatatttcctgaagaccatcttttgcaaagactatttactccctcactggccaggaagtatgaagagctgtatgagcaaaatggggtcaaatttgtgaagggtgctatgattaaaaacctagaagccggttctgatggaagtgtggctgctgtcaatctcgaaaatggttctaccatagaagctgacactataattattggtatcggagctaaacctgctgtcggtccttttgaaaacgttggcttagatacaactgttggtggtatagaggttgatggtctgttccgctccaaagttcctggaatttttgccattggagatgtcgcagcatttccattgaaaatgtatgaccgtgttgctcgagttgaacatgtggatcatgcccgtaaatcagctcagcattgtgtcagtgcgcttttgagtgctcgaactcacacatacgattatctcccttatttctactcaagggtatttgaatatgaagggagccaaagaaaagtatggtggcaatttttcggggacaatgttggagaggcagttgaggttggaaactttgaccccaagattgctacattctggatagattctgggagactgaaaggagttcttgttgaaagcgggagtcctgaggaattccaacttcttcccaaaattgccaaggctcaacctttggttgacaaagccaagctgcaaagtgcatcttcagtagaggaggccttggaaatcattcatcagtcaatgtag

SEQ ID NO: 8842 - protein, 497 aa, Spinacia oleracea
MSTVGRFMATMSNSLSLKHGVSLYSSTSSSFSLSKLHCKPSLVASRPFYNRRCFSISASSSFANDNREYVIVGGGNAAGYAARTFVEHGLADGKLCIVTKEAYAPYERPALTKGYLFPLDKKPARLPGFHTCVGGGGERQTPEWYQEKGIEMIYEDAVTGVDIEKHTLQTQSGKSLKYGSLIVATGCTATRFPEKIGGNLPGVHYVRDVADADSLIESLKKAKKVVIVGGGYIGMEVAAAAVGWNLDTTVIFPEDHLLQRLFTPSLARKYEELYEQNGVKFVKGAMIKNLEAGSDGSVAAVNLENGSTIEADTIIIGIGAKPAVGPFENVGLDTTVGGIEVDGLFRSKVPGIFAIGDVAAFPLKMYDRVARVEHVDHARKSAQHCVSALLSARTHTYDYLPYFYSRVFEYEGSQRKVWWQFFGDNVGEAVEVGNFDPKIATFWIDSGRLKGVLVESGSPEEFQLLPKIAKAQPLVDKAKLQSASSVEEALEIIHQSM

SEQ ID NO: 8843 - DNA, 1452 bp, Brassica juncea
  CDS (1)..(1452)
atggcgttagcatccaccacgctgccagcgaagaccggattgtctctttggtgtcccacttctccctccctcgctcgccgtcttcccgttcgtttttcttccagaatcgcttcgagaggtctcgtcactgcttcgttcgccaacgagaatcgcgagtttgtgataattgggggaggaaatgcggcggggtatgcagctaggacctttgttgaaaacggaatggccgatggtcgcctttgtattgtcaccaaagaggcttatgcgccttatgagagacctgccttgacaaaagcttacttgttccctccagagaagaagcctgctcgtcttccaggctttcatacttgtgttggaggtggtggagagaggcaaacaccagattggtacaaggagaaagggattgagatgatatatgaagatcctgtgactggagctgattttgaaaagcaaaccctcacgacaaacacagggaagcagttgaaatatggatcccttattatcgctacagggtgtactgcctctaggttcccagataaaattggtggaaacttgcctggggttcactatattcgggaggttgcagatgctgattcacttatttcatctctgggaaagtcaaagaaagttgtcattgttggtggtggctacatcggcatggaggctgctgctgcagctgttgcgtggaacctagatacaacgattgtattccccgaagatcagcttttgcaaagattgttcactccctcacttgctcagagatacgaagagctataccgtcaaaatggtgttaagtttgtcaagggcgcttcgataaataacttagaagctggttcggatgggcgtgtaacagctgttaagcttgctgatggatctacaattgaggcagacacggttgtgatcggaattggagctaagcctgctattggcccctttgaaactttggctatgaacaaatcaattggaggcattcaggttgatggcttgttcaggacaagtacccctggaattttcgctattggagatgtcgcagccttcccattgaagatatatgatcggatgacccgagttgaacatgttgatcacgcccgccgttctgcacaacactgcgtgaaatctctgctcactgcacacactgacacgtatgattatctcccgtatttctactcaagagtattcgagtatgaaggcagctcaagaaaagtttggtggcagttttatggggataatgtgggagaaacagttgaagttggcaacttcgatcccaagatcgctaccttctggattgattctggcaggttgaaaggtgtttttgtagaaagtggttctccagaggagtttcagcttctcccaaagctagcaagaagtcaaccaattgtggacaaggctaaactcgccagcgcatcttcagtggaagaagccctcgagattgctcaagccgctctacagagttaa

SEQ ID NO: 8844 - protein, 483 aa, Brassica juncea
MALASTTLPAKTGLSLWCPTSPSLARRLPVRFSSRIASRGLVTASFANENREFVIIGGGNAAGYAARTFVENGMADGRLCIVTKEAYAPYERPALTKAYLFPPEKKPARLPGFHTCVGGGGERQTPDWYKEKGIEMIYEDPVTGADFEKQTLTTNTGKQLKYGSLIIATGCTASRFPDKIGGNLPGVHYIREVADADSLISSLGKSKKVVIVGGGYIGMEAAAAAVAWNLDTTIVFPEDQLLQRLFTPSLAQRYEELYRQNGVKFVKGASINNLEAGSDGRVTAVKLADGSTIEADTVVIGIGAKPAIGPFETLAMNKSIGGIQVDGLFRTSTPGIFAIGDVAAFPLKIYDRMTRVEHVDHARRSAQHCVKSLLTAHTDTYDYLPYFYSRVFEYEGSSRKVWWQFYGDNVGETVEVGNFDPKIATFWIDSGRLKGVFVESGSPEEFQLLPKLARSQPIVDKAKLASASSVEEALEIAQAALQS

SEQ ID NO: 8845 - DNA, 1308 bp, Oryza sativa subsp. japonica
  CDS (1)..(1308)
atggcgtcggagaagcacttcaagtacgtcatcctcggcggcggcgtcgcagcgggatatgcggcacgggagttcgccaagcagggtgttaagccaggggagctcgccatcatctccaaggaggccgtggctccttatgagcgccctgctctcagcaagggatacctctttcctcagaatgctgcaagactcccaggatttcatgtgtgtgtcggcagtggaggagagaggcttttgcccgaatggtactcagagaaaggcattgagttgatcctgagcactgaaattgtcaaagctgatcttgcctccaagactttgactagtgcagttggagcaacctttacatatgagattttgatcattgcaactggctcctcagtcatcaagctatcagattttggtactcaaggagctgattccaacaacattttatatctaagggaagtagatgatgctgacaagctggttgcagctatccaagcaaagaagggtggaaaggcagttattgtaggaggaggttacattggtctagaacttagtgctgcattgaagatcaatgattttgatgtcacgatggtgtttcctgaaccttggtgcatgcctcgtctcttcactgctgatatcgcggctttctatgagagttactacactaacaaaggagttaagatcgtgaagggtacagtagctgttggttttgatgctgatgctaatggtgatgtcacagcagttaacctgaagaatggcagtgtgcttgaagctgatattgttggtgttggtgttgggggcagaccgctgactactctctttaaaggtcaagttgctgaggagaaaggtggaattaagaccgatgctttctttgaaacaagtgttcctggagtctatgctgtcggtgatgtggccaccttccccatgaagatgtacaatgagttgaggagagtggaacatgttgaccatgctaggaagtctgcagagcaggctgtaaaggcaatcaagggaaaagagtccggcgagtccgttgtggagtatgactatctgccatacttctactcccggtcattcgacctgggatggcaattctacggcgacaacgttggcgacaccatcctgttcggagacagtgacccgacctctgccaagcccaagttcgggtcctactggatcaaggacggcaaggtgttgggtgccttcctggagggtgggtcacctgatgagaacaaggccattgccaaggtcgcgaaaactcagccgcccgttgccaacatagaggagctcaagaaggaaggcctccagttcgccagcaaaatatga

SEQ ID NO: 8846 - protein, 435 aa, Oryza sativa subsp. japonica
MASEKHFKYVILGGGVAAGYAAREFAKQGVKPGELAIISKEAVAPYERPALSKGYLFPQNAARLPGFHVCVGSGGERLLPEWYSEKGIELILSTEIVKADLASKTLTSAVGATFTYEILIIATGSSVIKLSDFGTQGADSNNILYLREVDDADKLVAAIQAKKGGKAVIVGGGYIGLELSAALKINDFDVTMVFPEPWCMPRLFTADIAAFYESYYTNKGVKIVKGTVAVGFDADANGDVTAVNLKNGSVLEADIVGVGVGGRPLTTLFKGQVAEEKGGIKTDAFFETSVPGVYAVGDVATFPMKMYNELRRVEHVDHARKSAEQAVKAIKGKESGESVVEYDYLPYFYSRSFDLGWQFYGDNVGDTILFGDSDPTSAKPKFGSYWIKDGKVLGAFLEGGSPDENKAIAKVAKTQPPVANIEELKKEGLQFASKI

SEQ ID NO: 8847 - DNA, 1305 bp, Cucumis sativus
  CDS (1)..(1305)
atggcagatgagaccttcaaatacgtgattcttggtggtggcgttgccgctggatatgcagctagggaattcgttaaacagggacttaatccaggagaattggcgattatatccaaggaggcggttgctccttatgagcgtccagctcttagcaaagcctatctctttcccgagtcccctgctagattaccagggttccatgtatgtgtaggaagtggaggggagaggttgcttcctgattggtacaaggaaaaagggatcgagttgattctcagtacagaaattgttgaagcagatcttcctgccaagagactcagaagtgctcatgggaaaatttacaattaccaaactttgattattgctactggttctactgttattaaattgtctgactttggagttcaaggagcggatgccaaaaacattttctatttgagagaaattgatgatgctgatcagctagttgaagcaatcaaagcaaaggaaaatggaaaagtggttgttgttggaggaggatacataggccttgagcttggtgcagcgttgagaataaacaactttgatgtcagcatggtttatcctgaaccatggtgcatgcctaggctattcactccagaaatagctgctttctatgaaggttattatgcacaaaaaggaatcacaatcattaaaggaacagtcgctgtaggcttcacagttgatactaatggagaggttaaggaagtgaaacttaaagatggcagggtcttagaagctgacattgttgttgttggtgttggtgcacggccactgacaagcttattcaagggtcaaatcgtagaagaaaaaggaggcattaagactgatgaattcttcaagacgagtgttcctgatgtatacgcggtgggcgatgtggctacttttcctttgaagctttacaatgaactgagaagagttgagcatgttgaccattctcgcaaatcagcagagcaagctgtgaaggccatcaaggcgagtgaagagggcaaagccattgaggagtatgactatcttccatacttctactctcgatcctttgatttatcatggcagttttacggggataatgttggcgacgcagtcttatttggagacaacagtcctgattcagctactcacaaatttgggtcatattggatcaaagatgggaaggttgtgggagctttcctagagagtgggagtcctgaagaaaacaaggccattgccaaagttgctaggattcaaccatcagttgagagctcagatttgctccttaaagaaggcatctcctttgcatccaaggtttaa

SEQ ID NO: 8848 - protein, 434 aa, Cucumis sativus
MADETFKYVILGGGVAAGYAAREFVKQGLNPGELAIISKEAVAPYERPALSKAYLFPESPARLPGFHVCVGSGGERLLPDWYKEKGIELILSTEIVEADLPAKRLRSAHGKIYNYQTLIIATGSTVIKLSDFGVQGADAKNIFYLREIDDADQLVEAIKAKENGKVVVVGGGYIGLELGAALRINNFDVSMVYPEPWCMPRLFTPEIAAFYEGYYAQKGITIIKGTVAVGFTVDTNGEVKEVKLKDGRVLEADIVVVGVGARPLTSLFKGQIVEEKGGIKTDEFFKTSVPDVYAVGDVATFPLKLYNELRRVEHVDHSRKSAEQAVKAIKASEEGKAIEEYDYLPYFYSRSFDLSWQFYGDNVGDAVLFGDNSPDSATHKFGSYWIKDGKVVGAFLESGSPEENKAIAKVARIQPSVESSDLLLKEGISFASKV

SEQ ID NO: 8849 - DNA, 1302 bp, Pisum sativum
  CDS (1)..(1302)
atggtgcattcgttcaagtatatcatcattggaggaggagtttcagctggttatgcagcaagggagtttgtgaaacaaggagttcatcctggggagcttgcaattatatctaaagaagcggtagcaccttatgaacgtcctgctctgagcaaggcttacctttttccagagtctcctgctaggcttcctgggttccatacctgtgttggaagtgggggagaaagattgcttccagagtggtacagtgagaaagggatacagctgtatctcagtacagaaattgtaagtgcagatcttgctgcaaaatttctgaaaagtgcaaacggagaacacttcgattaccagactttggttatcgcaacaggctcagctgttataaggttgacagatttcggtgtaataggagctaatgccaaaaacatattttaccttagggaggttgatgatgctgacaaattgtacgaggcaatcaaaagaaagaagaatgcgaaacgtgtggttgttggaggaggatacattggtctggagttgagtgcagttttgaaactcaatgatcttgatgttaccatggtctacccagaaccttggtgtatgccacgactttttacttctgaaattgctgctttctatgagggatattatgccaataaagggatcaatatcattaaagggacagttgctgttggattcactgccaactccgatggagaggtaaaagaagtcaaactaaaggatggtagggtcctggaagcagatattgtcattgttggtgttggaggaaggcctcaaatatccttattcaaagggcaggttgaagagcagcatggtggaatcaagactgattccttcttcaaaacaagtgttcctgatgtatatgccgttggtgatgttgctacgttccctttgaaattgtacaatgacgtgagaagagttgaacacgttgatcatgctcgcaaatcagctgagcaggctgcaaaggccatctttgcagcagatgtaggaaaatcagttgaagagtatgattaccttccatacttctattcccgttcgtttgatctgtcctggcaattctatggcgacaatgttggtgagacagtgctatttggagacaacgatcctgcatcatcaaagcctaaatttgggacatactggattaaagaagggaaagttgttggggcctttttggagggtggaactcctgatgagaataaagctattgccaaagttgcaagagccaagcctgcagtggaggatgtgaatcaacttgcagaggaaggcctttcttttgcaagtaaaatttaa

SEQ ID NO: 8850 - protein, 433 aa, Pisum sativum
MVHSFKYIIIGGGVSAGYAAREFVKQGVHPGELAIISKEAVAPYERPALSKAYLFPESPARLPGFHTCVGSGGERLLPEWYSEKGIQLYLSTEIVSADLAAKFLKSANGEHFDYQTLVIATGSAVIRLTDFGVIGANAKNIFYLREVDDADKLYEAIKRKKNAKRVVVGGGYIGLELSAVLKLNDLDVTMVYPEPWCMPRLFTSEIAAFYEGYYANKGINIIKGTVAVGFTANSDGEVKEVKLKDGRVLEADIVIVGVGGRPQISLFKGQVEEQHGGIKTDSFFKTSVPDVYAVGDVATFPLKLYNDVRRVEHVDHARKSAEQAAKAIFAADVGKSVEEYDYLPYFYSRSFDLSWQFYGDNVGETVLFGDNDPASSKPKFGTYWIKEGKVVGAFLEGGTPDENKAIAKVARAKPAVEDVNQLAEEGLSFASKI

SEQ ID NO: 8851 - DNA, 1302 bp, Solanum lycopersicum
  CDS (1)..(1302)
atggcggagaaatcattcaagtatgtgatcgtcggtggcggtgtttctgctgggtatgctgctagagaatttgccaaacagggagttaagcctggggaactggctattatttccaaagaggcagtggctccttatgaacgtcctgcacttagcaaggcatacctttttcctgaaggagctgctagactcccaggatttcatgtgtgtgttggaagtggaggagagagacagcttcctgagtggtatgcagagaaaggcatttcgttgatcctgagtactgaaatagtgaaagcagatcttgcttcaaagactcttgttagtgcagctggggaatcttttaaatatcaaacacttgttattgcaacaggtaccaccgttttgaagttgtcagattttggtgtacaaggtgctgattccaagaatatcttttacttgagagaaatcgatgatgctgatcaacttgtggaagcattaaaagctaagaaaaatggtaaagctgttgttgttgggggagggtacatcggtctcgagcttagtgctgtactgagactgaacaacattgaagtcaatatggtttacccagaaccatggtgcatgcctcggcttttcacagagggcatagctgcgttctatgaaggttattataaaaacaagggagtcaatattatcaagggtacagtggctgttgggtttgatacccatccaaatggagaggtgaaggaagtcaaactcaaagatggcagagttttggaagctgacatagtagtcgtaggagtcggagcaagaccactcacaactctattcaaagggcaagttgaagaggagaagggtggaattaagacagatgcgttcttcaaaacaagtgtacctgatgtatatgctgtgggtgatgttgccacttttcctttgaaaatgtacaatgagattagaagagttgaacatgttgatcattctcgcaaatctgctgagcaggctgtcaaggcaatatttgccagtgagcaagggaagtctgtcgatgaatatgactaccttccatacttctattcccgcgccttcgatttgtcttggcaattctacggtgataatgtgggtgaaacagtgctctttggggacgctgatcccaactctgcaactcacaagtttggacaatactggatcaaagatggaaagatcgttggtgcattcctcgagagtgggtcacctgaagagaacaaggcaattgctaaggttgcaaaggttcaaccccctgctaccttggatcaattggcacaggagggcatcagttttgcctcaaagatctaa

SEQ ID NO: 8852 - protein, 433 aa, Solanum lycopersicum
MAEKSFKYVIVGGGVSAGYAAREFAKQGVKPGELAIISKEAVAPYERPALSKAYLFPEGAARLPGFHVCVGSGGERQLPEWYAEKGISLILSTEIVKADLASKTLVSAAGESFKYQTLVIATGTTVLKLSDFGVQGADSKNIFYLREIDDADQLVEALKAKKNGKAVVVGGGYIGLELSAVLRLNNIEVNMVYPEPWCMPRLFTEGIAAFYEGYYKNKGVNIIKGTVAVGFDTHPNGEVKEVKLKDGRVLEADIVVVGVGARPLTTLFKGQVEEEKGGIKTDAFFKTSVPDVYAVGDVATFPLKMYNEIRRVEHVDHSRKSAEQAVKAIFASEQGKSVDEYDYLPYFYSRAFDLSWQFYGDNVGETVLFGDADPNSATHKFGQYWIKDGKIVGAFLESGSPEENKAIAKVAKVQPPATLDQLAQEGISFASKI

SEQ ID NO: 8853 - DNA, 1437 bp, Oryza sativa
  CDS (1)..(1437)
atggggagagcctttgtgtatgtgattcttggaggaggcgtggctgctggctatgctgctcttgaattcgtcaagaaaggagtctctcatggtgaactctgtattatttccgatgaaccagttgctccttatgaaaggcctgcattgagcaaaggatttttgcttccagaagctgctgcccggcttccatcctttcatacctgtgttggtgcaaatgaggagaggctaactccaaaatggtataaagagcatgggattgaattagttcttggaaccggagttaaatccactgatgtgaaacgtaagacactattaacaacaactggagagaccataagttacaagattctgattgttgctactggtgctcgggctttgaagctggaagaatttggggtgagtggatcagatgcagaaaatgtatgttatttaagacatatagcagatgcaaataggcttgtagatgttatgcagtcttgtcctggaggtaatgctgttgtcattggtggtggatacataggcatggagtgtgcagcgtctttagtgatcaataaaataaatgtaacaatggtcttccctgaggaacattgcatggctcgtttatttacctcaaagattgcaaactactatgaagaatattataaatcaagaggagtaaacttcattaagggaactgtgctgtcatcatttgattttgactccaatgggaaggttacagctgttaatcttagagatggaaccacgctatctgtggacatggttgtggtgggaattggaatacgtccaaatacaggtttgtttgaaggccaacttactttggagaaaggtggaatcaaagtaaatgggatgttgcagtcaagcaacagctcagtctatgccattggagatgttgcagcatttccagtcaaagcatttggggaaacacgaagacttgagcatgttgattcagcacggaaatctgcaatacatgttgtttcttccataatggaaccaaacaaaacgggagaatttgattacattccttttttctactccagagtcttcacactgtcttggcaattttatggggataatgttggggaagttgtctattatggagatatgtcaggtagtgcatttggggcatactgggtaagcaagggtcaccttgttggggctttccttgaaggtggaactaaagaagaatatgaagccatagccaaggctactaggttaaggccagcaattgaagacttgactgaactggagagacagggtttgagttttgcagttacagttagccagaaaccggtggtgccacccccagtcgaggttagggcctcggacctacttttggaaaaaccactatatgcttggcatgccacagccggggttattattgctgcatcaatagctgcatttgcatatttttacggaaaaaagcgccgcagatggtga

SEQ ID NO: 8854 - protein, 478 aa, Oryza sativa
MGRAFVYVILGGGVAAGYAALEFVKKGVSHGELCIISDEPVAPYERPALSKGFLLPEAAARLPSFHTCVGANEERLTPKWYKEHGIELVLGTGVKSTDVKRKTLLTTTGETISYKILIVATGARALKLEEFGVSGSDAENVCYLRHIADANRLVDVMQSCPGGNAVVIGGGYIGMECAASLVINKINVTMVFPEEHCMARLFTSKIANYYEEYYKSRGVNFIKGTVLSSFDFDSNGKVTAVNLRDGTTLSVDMVVVGIGIRPNTGLFEGQLTLEKGGIKVNGMLQSSNSSVYAIGDVAAFPVKAFGETRRLEHVDSARKSAIHVVSSIMEPNKTGEFDYIPFFYSRVFTLSWQFYGDNVGEVVYYGDMSGSAFGAYWVSKGHLVGAFLEGGTKEEYEAIAKATRLRPAIEDLTELERQGLSFAVTVSQKPVVPPPVEVRASDLLLEKPLYAWHATAGVIIAASIAAFAYFYGKKRRRW

SEQ ID NO: 8855 - DNA, 1308 bp, Brassica napus
  CDS (1)..(1308)
atggcggaagagaagagcttcaagtacgtgatcgtcggaggtggtgtagccgccggatacgcggcgagagagttctctaagcaaggtctcaagcctggtgaacttgctatcatctccagggaacctgtgcctccatatgagcgtcctgcactcagcaaaggatatatcaatctcgagaataaagcttcacttccaaatttctatgtatgtgctggaagtggaggagagaaacagttccctcaatggtacaaagacaatgggattgagctgcttctagacacagagattgtcaaagcagatcttgctgcaaagactctcgtcagtggcactggtcaagtcttcaagtaccaaactttgatagctgctactggttcttctgtcacaaggctgtctgattttggcgttgaaggtgcagatgctaagaacatattctacctaagagagcttctggacgctgatgagctcgtgactgcaatgaacgtgaaggcgaatggcaaagctgtggttgttggcggcggttacattggtcttgagctcagttcagctctcaaggttaacaacatggaagttaccatggtttatccagagccttggtgtatgcctcggcttttcaccgccggcattgcttccttctacgagggcttctacgccaacaaaggaatcaacattgtcaaaggcaccgttgcagctggtttcaacaccaactcagatggagaggtcactgaggtgatattgaaagacggaagaacattagaagctgatatagtgatagtaggtgttggtgctagacctattatctcactcttcaaaggccaagttgaagaagacaagggtggactcaagactgatgcattcttcagaacgagcgttccagatgtatacgccgttggtgacatagccaccttcccaatgaaactctacaatgacatgagacgcgttgagcacgtggaccatgctcgcaagtccgctgaacaggccgttaaggcaatcaaggctgcagaggaaggaaactctattccagaatatgactatcttccgtacttctactcgcgagcctttaacctctcgtggcaattctacggtgacaacgttggagagaccgtgttgtttggggacaatgatccaacatctgctaaaccgaagtttgggagcttctggattaaagatgggaagttgataggagcgtttctagaaggaggaagtcctgatgagaacaaggctattgctaaggctgcaagagaacaaccttttgttgagagcgttgaggtgttgtctaaggaaggtctttccttcgtcagcaacatataa

SEQ ID NO: 8856 - protein, 435 aa, Brassica napus
MAEEKSFKYVIVGGGVAAGYAAREFSKQGLKPGELAIISREPVPPYERPALSKGYINLENKASLPNFYVCAGSGGEKQFPQWYKDNGIELLLDTEIVKADLAAKTLVSGTGQVFKYQTLIAATGSSVTRLSDFGVEGADAKNIFYLRELLDADELVTAMNVKANGKAVVVGGGYIGLELSSALKVNNMEVTMVYPEPWCMPRLFTAGIASFYEGFYANKGINIVKGTVAAGFNTNSDGEVTEVILKDGRTLEADIVIVGVGARPIISLFKGQVEEDKGGLKTDAFFRTSVPDVYAVGDIATFPMKLYNDMRRVEHVDHARKSAEQAVKAIKAAEEGNSIPEYDYLPYFYSRAFNLSWQFYGDNVGETVLFGDNDPTSAKPKFGSFWIKDGKLIGAFLEGGSPDENKAIAKAAREQPFVESVEVLSKEGLSFVSNI

SEQ ID NO: 8857 - DNA, 1437 bp, Glycine max
  CDS (1)..(1437)
atggggagagcctttgtgtatgtgattcttggaggaggcgtggctgctggctatgctgctcttgaattcgtcaagaaaggagtctctcatggtgaactgtgtattatttccgatgaaccagtggctccttatgaaaggcccgcattgagcaaaggatttttgcttccagaagctgctgcccggcttccatcctttcatacctgtgttggtgcaaatgaggagaggctaactccaaaatggtataaagagcatgggattgaattagttcttggaactggagttaaatctgctgatgtaaaacgtaagacactattaacaacaaccggagagaccataagttacaagattcttattgttgctaccggtgctcgggctttgaagctggaagaatttggggtcactggatcagatgcaggaaatgtctgttatttaagagatatagcagatgcaaataggcttgttgatgttatgcaatcttgtcctggaggtaatgctgttgtcattggtggtggatacataggcatggagtgtgcagcgtctttagtgatcaataaaataaatgtaacaatggtctttcctgaggaacattgcatggctcgattatttacctcaaagatagcaaactactatgaagaatattataaatcaagaggagtaaacttcattaagggaactgtgctgtcatcatttgattttgattccaatgggaaggttacagctgttaatcttagagatggaagcacactatctgtggacatggttgtggtaggaattggaatacgtccaaatacagggctgtttgaaggccagcttactttggagaaaggtggaatcaaagtaaatgggatgttgcagtcaagcaacagctcagtctatgccattggagatgttgcagcatttccagtcaaagcagttggggaaacacgaagacttgagcatgttgattcagcacggaaatctgcgagacatgttgtttctgccataatggaaccaaacaaaacgagagaattcgattaccttccttttttcgattccagaatcttcacactgtcttggcaattttatggtgataatgttggggaagttgtctattatggagatatgtcaggtagtacatttggagcatactgggtaagcaaggatcaccttgttggggctttccttgaaggcggaactaaagaagagtatgaagccatagccaaggccactaggttaaggccggtaattgaagacttgactgaacttgagagacagggtttgaggtttgctgttacagttagcgagaaaccgatggcctcacccccaattgaggttagggcctcagacctacttttggaaaaaccattatatgcttggtatgctacagctggggttattattgctgcatcaatagctggatttgcatatttttatgggaaaaagcgccacagatggtga

SEQ ID NO: 8858 - protein, 478 aa, Glycine max
MGRAFVYVILGGGVAAGYAALEFVKKGVSHGELCIISDEPVAPYERPALSKGFLLPEAAARLPSFHTCVGANEERLTPKWYKEHGIELVLGTGVKSADVKRKTLLTTTGETISYKILIVATGARALKLEEFGVTGSDAGNVCYLRDIADANRLVDVMQSCPGGNAVVIGGGYIGMECAASLVINKINVTMVFPEEHCMARLFTSKIANYYEEYYKSRGVNFIKGTVLSSFDFDSNGKVTAVNLRDGSTLSVDMVVVGIGIRPNTGLFEGQLTLEKGGIKVNGMLQSSNSSVYAIGDVAAFPVKAVGETRRLEHVDSARKSARHVVSAIMEPNKTREFDYLPFFDSRIFTLSWQFYGDNVGEVVYYGDMSGSTFGAYWVSKDHLVGAFLEGGTKEEYEAIAKATRLRPVIEDLTELERQGLRFAVTVSEKPMASPPIEVRASDLLLEKPLYAWYATAGVIIAASIAGFAYFYGKKRHRW

SEQ ID NO: 8859 - DNA, 1467 bp, Zea mays
  CDS (1)..(1467)
atggcttccgcggcgacacagtgcttcagctactcctcgttgccggccacgtgggctctgcggcagcggggcggcggtgccagcgtgctccggctctcttcccggcggaccttctcggtctccgcggcggccgggttcgacaaccagaaccgcgagtatgtgatcgtcgggggagggaacgctgcgggttacgccgccaggacgttcgtggagcatggcatggctgacggccgcctttgcatcgtctccaaggagccagttccaccatacgagcggccagccttgaccaaaggctatctttttcctccggacaagaaaccggctcgcctacctggtttccatacatgcgttggatctggtggacagcgacagactgctgaatggtacaaggagaatggtatagaggtgctgtatgaggatccagttgtagcatttgatggcaaaacgcaaaccttaaagacttcatcggggaaagttctgaaatacggctcacttattatttctactggatgtgaagcatcgagattacctgagaaaattggagggaaattacctggagttcactacatacgggatgttgctgatgctgatgctctagtatcctcattgggaagtgcaaagaaggtggtggttattggtgggggctatattggcatggaggtagctgcagcagcttgtggctggaatcttgacacaacgattatattcccagaggaccacattatgccaagattatttacgccctcgcttgctaagaagtatgaggaactgtatcagcaaaatggtgtcaaattcataaagggagctcttatcgaaaaacttggagctggctctgatggaagggtgtcttctgcagtacttaaggatggatctgtagttgaagctgatacagtaattgttggtataggagcaaaaccagttgtcagcccgtttgaagctgttggagttaaccctaaagttggtggaatagaggttgattccttgttcagaactagtgtacctggcatctttgcaattggagatgtagcagcgttccccctgaagatgtacaatagaattgctcgagtggaacatgtggatcatgctcggaagtccgcacaccactgtatagagacgctcctaacatcccagacaaaagcgtatgactaccttccatacttctactcgagggtttttgagtacgagggaagttcgaggaaagtctggtggcagttttatggcgacaatgtcggcgaagcagtcgaagtagggaactttgatccaaaggttgcgactttctggatcgactctgatagccggctgaagggtgttttcctcgagagtggaacctcagaggaattctcgcttcttccgcagctcgccaaatctcagcctgttgttgacaagtcaaagctccaggccgcgacttctgttgaagatgcattagagattgcaagaagctcactccggtccagcgccacggtttag

SEQ ID NO: 8860 - protein, 488 aa, Zea mays
MASAATQCFSYSSLPATWALRQRGGGASVLRLSSRRTFSVSAAAGFDNQNREYVIVGGGNAAGYAARTFVEHGMADGRLCIVSKEPVPPYERPALTKGYLFPPDKKPARLPGFHTCVGSGGQRQTAEWYKENGIEVLYEDPVVAFDGKTQTLKTSSGKVLKYGSLIISTGCEASRLPEKIGGKLPGVHYIRDVADADALVSSLGSAKKVVVIGGGYIGMEVAAAACGWNLDTTIIFPEDHIMPRLFTPSLAKKYEELYQQNGVKFIKGALIEKLGAGSDGRVSSAVLKDGSVVEADTVIVGIGAKPVVSPFEAVGVNPKVGGIEVDSLFRTSVPGIFAIGDVAAFPLKMYNRIARVEHVDHARKSAHHCIETLLTSQTKAYDYLPYFYSRVFEYEGSSRKVWWQFYGDNVGEAVEVGNFDPKVATFWIDSDSRLKGVFLESGTSEEFSLLPQLAKSQPVVDKSKLQAATSVEDALEIARSSLRSSATV

SEQ ID NO: 8861 - DNA, 1308 bp, Brassica napus
  CDS (1)..(1308)
atggcggaagagaagagcttcaagtacgtgatcgtcggaggcggtgtcgccgccggatacgcggcgagagagttctctaagcaaggtctcaagcctggtgaacttgctatcatctccagggaaccggtgcctccatatgagcgtcctgcactcagcaaaggatatatcaatctcgagaataaagcttcacttccaaatttctatgtctgtgctggaagtgggggagagaaacagttccctcaatggtacaaagacaatgggattgagctgcttctggagacagagattgtcaaagcagatcttgcttcaaagactctcgtcagtggcactggacaagtcttcaagtaccaaactttgatagctgctactggctcttctgtcacaaggctgtctgattttggcgtggaaggtgcagatgctaagaatatattctacctaagagagcttctggacgctgatgagctcgtgactgcaatgaacgtaaaggcaaacggcaaagctgtggttgttggtggcggttacattggtcttgaactcagttctgctctcaaggttaacaacatggaagttaccatggtttatccagagccttggtgcatgcctcggcttttcaccgccggcattgcttccttctacgagggtttctacgccaacaaaggaataaacatcgtcaaaggcaccgtggcagctggtttcagcaccaactcagatggagaggtcactgaggtgatactaaaggacggaagaacattagaagccgatatagtgatagtaggtgttggtgctagacctattatatcactcttcaaaggtcaagttgatgaagacaagggcggactcaaaactgatgcattcttcagaacaagcgttccacatgtatacgccgttggtgacatagcaaccttcccaatgaaactctacaacgacatgagacgcgtggagcacgtcgaccatgctcgcaagtccgctgaacaagccgttaaggcaatcaaggctgcagaggaaggaaactcgattccagaatatgactatcttccgtacttctactcgcgagcctttaacctctcgtggcaattctacggtgacaacgttggagagaccgtgttgtttggggataatgacccgacatctgctaaaccgaagtttgggagcttctggattaaagatgggaagttgataggagcgtttctagaaggaggaagtcctgatgagaacaaggctattgctaaggctgcaagagaacaaccttttgttgagagcgttgaggtgttgtctaaggaaggtctttccttcgtcagcaacatataa

SEQ ID NO: 8862 - protein, 435 aa, Brassica napus
MAEEKSFKYVIVGGGVAAGYAAREFSKQGLKPGELAIISREPVPPYERPALSKGYINLENKASLPNFYVCAGSGGEKQFPQWYKDNGIELLLETEIVKADLASKTLVSGTGQVFKYQTLIAATGSSVTRLSDFGVEGADAKNIFYLRELLDADELVTAMNVKANGKAVVVGGGYIGLELSSALKVNNMEVTMVYPEPWCMPRLFTAGIASFYEGFYANKGINIVKGTVAAGFSTNSDGEVTEVILKDGRTLEADIVIVGVGARPIISLFKGQVDEDKGGLKTDAFFRTSVPHVYAVGDIATFPMKLYNDMRRVEHVDHARKSAEQAVKAIKAAEEGNSIPEYDYLPYFYSRAFNLSWQFYGDNVGETVLFGDNDPTSAKPKFGSFWIKDGKLIGAFLEGGSPDENKAIAKAAREQPFVESVEVLSKEGLSFVSNI

SEQ ID NO: 8863 - DNA, 1305 bp, Brassica napus
  CDS (1)..(1305)
atggcggagaagagcttcaagtacatcatcctcggcggcggcgtctcagccggatacgcagctaaggagtttgctagtcaaggggttaaaccaggggaattggcagttatctccaaagaggcggtggctccttatgaacgtcctgctcttagcaagggctatttgtttcctgaaggggcggctagactcccaggtttccattgctgtgttggtagtggtggagaaaaactgcttcctgaatcatacaaacagaaagggattgagttgatactaagaacagagatagtgaaagcagatctcgctgccaagagtcttgtcagtgcagctggggatgtcttcaaatatgagactctcataattgcaactggctctactgtcttgagattgactgattttggtgtaaaaggtgctgactctaagaatatcctctatcttagagagattgatgatgcagacaaagtggttgaagctattcaagcaaagaaaggtggaaaggctgtggttgttggtggaggctacattggtcttgagcttagtgcagctttgaggatcaacaattttgatgtcactatggttttccctgaaccttggtgcatgcctaggcttttcaccgccgacattgctgcgttctatgagacttactatacaaacaagggagtgaagatcattaaaggaacagtagcatctgggttcaccgctcatccaaatggagaggtgaatgaagtacaactcaaggatggaaggtcgctagaagccgacattgtgattgttggagttggtgcaaaaccattaacagccttattcaagggacaggtcgaagaagacaaaggtggaatcaagaccgatgcattcttcaaaacaagcgttcctgatgtttacgctgttggtgacgttgccactttccccttgaaaatgtatggagacatgagaagggtcgagcatgttgaccattctcgcaaatccgcagagcaagctgttaaggcgatcaaagcggctgagggaggcggagcggtggaggaatacgactacctcccattcttctactcccgctcgtttgatctctcatggcagttctatggagacaacgtaggagactctgtcttgtttggagacagcaatccatcaaacccgaaaccaagatttggagcgtattgggttcaagatggtaaagtggttggagcattcatggaaggaggtagtggtgacgagaacaaagccttggctaaagtggccaaagctagacctgctgcagagagcctcgatgatcttaccaaacaaggtatctcctttgctgctaagatctga

SEQ ID NO: 8864 - protein, 434 aa, Brassica napus
MAEKSFKYIILGGGVSAGYAAKEFASQGVKPGELAVISKEAVAPYERPALSKGYLFPEGAARLPGFHCCVGSGGEKLLPESYKQKGIELILRTEIVKADLAAKSLVSAAGDVFKYETLIIATGSTVLRLTDFGVKGADSKNILYLREIDDADKVVEAIQAKKGGKAVVVGGGYIGLELSAALRINNFDVTMVFPEPWCMPRLFTADIAAFYETYYTNKGVKIIKGTVASGFTAHPNGEVNEVQLKDGRSLEADIVIVGVGAKPLTALFKGQVEEDKGGIKTDAFFKTSVPDVYAVGDVATFPLKMYGDMRRVEHVDHSRKSAEQAVKAIKAAEGGGAVEEYDYLPFFYSRSFDLSWQFYGDNVGDSVLFGDSNPSNPKPRFGAYWVQDGKVVGAFMEGGSGDENKALAKVAKARPAAESLDDLTKQGISFAAKI

SEQ ID NO: 8865 - DNA, 1308 bp, Brassica napus
  CDS (1)..(1308)
atggcggaagagaagagcttcaagtacgtgatcgtcggaggcggtgtagccgccggatacgcggcgagagagttctctaagcaaggtctcaagcctggtgaacttgctatcatctccagggaacctgtgcctccatatgagcgtcctgcactcagcaaaggatatatcaatctcgagaataaagcttcacttccaaatttctatgtatgtgctggaagtggaggagagaaacagttccctcaatggtacaaagacaatgggattgagctgcttctggacacagagattgtcaaagcagatcttgctgcaaagactctcgtcagtggcactggacaagtcttcaagtaccaaactttgatagctgctactggctcttctgtcacaaggctgtctgattttggcgtggaaggtgcagatgctaagaatatattctacctaagagagcttctggacgctgatgagctcgtgactgcaatgaacgtaaaggcaaacggcaaagctgtggttgttggtggcggttacattggtcttgaactcagttctgctctcaaggttaacaacatggaagttaccatggtttatccagagccttggtgcatgcctcggcttttcaccgccggcattgcttccttctacgagggtttctacgccaacaaaggaatcaacattgttaagggcaccgttgcagctggtttcagcaccaactcagatggagaggtcactgaggtgatactaaaggacggaagaacattagaagctgatatagtgatagtaggtgttggtgctagacctattatatcactcttcaaaggtcaagttgatgaagacaagggtggactcaagactgatgcattcttcagaacaagcgttccagatgtatacgccgttggtgacatagccaccttcccaatgaaactctacaacgacatgagacgcgttgagcacgtggaccatgctcgcaagtccgctgaacaagccgttaaggcaatcaaggctgcagaggaaggaaactcgattccagaatatgactatcttccgtacttctactcgcgagcctttaacctctcgtggcaattctacggtgacaacgttggagagaccgtgttgtttggggataatgacccgacatctgctaaaccgaagtttgggagcttctggattaaagatgggaagttgataggagcgtttctagaaggaggaagtcctgatgagaacaaggctattgctaaggctgcaagagaacaaccttttgttgagagcgttgaggtgttgtctaaggaaggtctttccttcgtcagcaacatataa

SEQ ID NO: 8866 - protein, 435 aa, Brassica napus
MAEEKSFKYVIVGGGVAAGYAAREFSKQGLKPGELAIISREPVPPYERPALSKGYINLENKASLPNFYVCAGSGGEKQFPQWYKDNGIELLLDTEIVKADLAAKTLVSGTGQVFKYQTLIAATGSSVTRLSDFGVEGADAKNIFYLRELLDADELVTAMNVKANGKAVVVGGGYIGLELSSALKVNNMEVTMVYPEPWCMPRLFTAGIASFYEGFYANKGINIVKGTVAAGFSTNSDGEVTEVILKDGRTLEADIVIVGVGARPIISLFKGQVDEDKGGLKTDAFFRTSVPDVYAVGDIATFPMKLYNDMRRVEHVDHARKSAEQAVKAIKAAEEGNSIPEYDYLPYFYSRAFNLSWQFYGDNVGETVLFGDNDPTSAKPKFGSFWIKDGKLIGAFLEGGSPDENKAIAKAAREQPFVESVEVLSKEGLSFVSNI

SEQ ID NO: 8867 - DNA, 1500 bp, Zea mays
  CDS (1)..(1500)
atgacttcagctctccggcggaaggcggcgcagatggcttccgcggcgacacagtgcttcagctactcctcgttgccggccacgtgggctctgcggcagcggggcggcggtgccagcgtgctccggctctcttcccggcggaccttctcggtctccgcggcggccgggttcgacaaccagaaccgcgagtatgtgatcgtcgggggagggaacgctgcgggttacgccgccaggacgttcgtggagcatggcatggctgacggccgcctttgcatcgtctccaaggagccagttccaccatacgagcggccagccttgaccaaaggctatcttttccctccggacaagaaaccggctcgcctacctggtttccatacatgcgttggatctggtggacagcgacagactgctgaatggtacaaggagaatggtatagaggtgctgtatgaggatccagttgtagcatttgatggcaaaacgcaaaccttaaagacttcatcggggaaagttctgaaatacggctcacttattatttctactggatgtgaagcatcgagattacctgagaaaattggagggaaattacctggagttcactacatacgggatgttgctgatgctgatgctctagtatcctcattgggaagtgcaaagaaggtggtggttattggtgggggctatattggcatggaggtagctgcagcagcttgtggctggaatcttgacacaactattatattcccagaggaccacattatgccaagattatttacaccctcgcttgctaagaagtatgaggaactgtatcagcaaaatggtgtcaaattcataaagggagctcttatcgaaaaacttggagctggctctgatggaagggtgtcttctgcagtacttaaggatggatctgtagttgaagctgatacagtaattgttggtataggagcaaaaccagttgtcagcccgtttgaagctgttggagttaaccctaaagttggtggaatagaggttgattccttgttcagaactagtgtacctggcatctttgcaattggagatgtagcagcgttccccctgaagatgtacaatagaattgctcgagtggaacatgtggatcatgctcggaagtctgcacaccactgtgtagagacgctcctaacatcccagacaaaagcgtatgactaccttccatacttctactcgagggtttttgagtacgagggaagttcgaggaaagtctggtggcagttttatggcgacaatgtcggcgaagcagtcgaagtagggaactttgatccaaaggttgcgactttctggatcgactctgatagccggctgaagggtgttttcctcgagagtggaacctcagaggaattctcgcttcttccgcagctcgccaaatctcagcctgttgttgacaagtcaaagctccaggccgcgacttctgttgaagatgcattagagattgcaagaagctcactccggtccagtgccacggtttag

SEQ ID NO: 8868 - protein, 499 aa, Zea mays
MTSALRRKAAQMASAATQCFSYSSLPATWALRQRGGGASVLRLSSRRTFSVSAAAGFDNQNREYVIVGGGNAAGYAARTFVEHGMADGRLCIVSKEPVPPYERPALTKGYLFPPDKKPARLPGFHTCVGSGGQRQTAEWYKENGIEVLYEDPVVAFDGKTQTLKTSSGKVLKYGSLIISTGCEASRLPEKIGGKLPGVHYIRDVADADALVSSLGSAKKVVVIGGGYIGMEVAAAACGWNLDTTIIFPEDHIMPRLFTPSLAKKYEELYQQNGVKFIKGALIEKLGAGSDGRVSSAVLKDGSVVEADTVIVGIGAKPVVSPFEAVGVNPKVGGIEVDSLFRTSVPGIFAIGDVAAFPLKMYNRIARVEHVDHARKSAHHCVETLLTSQTKAYDYLPYFYSRVFEYEGSSRKVWWQFYGDNVGEAVEVGNFDPKVATFWIDSDSRLKGVFLESGTSEEFSLLPQLAKSQPVVDKSKLQAATSVEDALEIARSSLRSSATV

SEQ ID NO: 8869 - DNA, 1302 bp, Glycine max
  CDS (1)..(1302)
atggcgaaaaccttcaaatacatcatcctcggtggaggagtttccgctggttatgcggcgagggagtttgccaaacagggcgttaagccaggggagttggctatcatttcgaaagaagcggtagcaccttatgaacgtcctgctctgagcaaggcttacctttttccagagtcccctgctagacttcctgggttccatgtctgtgttggaagtggaggagaaaggttgcttcctgagtggtacacagagaaagggatagagttaattcttagcacagaaatagtaaaggtagaccttgctgcaaaatctctgatcagtgctggaggagaaacattcagttatcagattttgattgttgcaactggctcaacagttataaggctgacagatttcggtgtagaaggagctgatgcgaaaaacatcttttatttgagggaggttgacgatgctgacaaattgtacgcagcaatcaaggcaaagaagaatgggaaagctgtggttgttgggggaggatacattggtctggagcttagtgcagtgttgaaactcaacaatattgatgttaccatggtctacccggagccttggtgtatgccacgactttttacggctggtatagctgaattctatgaggaatattacaaaaataagggtgtaaatatcattaaaggaactgttgctgttggattcacttctaattctgatggagaggtaaaagaagtcaaactaaaggatggcagggtcctggaagctgatattgttgtcgttggtgttggaggaaggcctcaaacagccttagtcaaagggcaggttgaagaggagaagggtggaatcaagaccgatgctttcttcaaaactaatctttccgatgtatatgctgttggtgatgttgctactttccctttgaaattatacggtgaattgagaagagttgaacatgttgatcattctcgcaaatcagctgaacaggctgtgaaggccatcaaggcagctgaggaaggaagaacagttgaggagtatgattaccttccatacttctattcccgttcatttgatctgtcttggcaattctatggcgacaatgtcggcgacacagtactattcggagacaacaatcctgcgtcgtcaaagcctaagtttgggacatactggattaaagatgggaaagttgttggggtctttctggaaggtggaactcctgaagagaaccaggctattgctaaagttgctaaggtccagcctccggttgcagatgtagatcaacttgctaaggaaggcctttcctttgctagtaaaatataa

SEQ ID NO: 8870 - protein, 433 aa, Glycine max
MAKTFKYIILGGGVSAGYAAREFAKQGVKPGELAIISKEAVAPYERPALSKAYLFPESPARLPGFHVCVGSGGERLLPEWYTEKGIELILSTEIVKVDLAAKSLISAGGETFSYQILIVATGSTVIRLTDFGVEGADAKNIFYLREVDDADKLYAAIKAKKNGKAVVVGGGYIGLELSAVLKLNNIDVTMVYPEPWCMPRLFTAGIAEFYEEYYKNKGVNIIKGTVAVGFTSNSDGEVKEVKLKDGRVLEADIVVVGVGGRPQTALVKGQVEEEKGGIKTDAFFKTNLSDVYAVGDVATFPLKLYGELRRVEHVDHSRKSAEQAVKAIKAAEEGRTVEEYDYLPYFYSRSFDLSWQFYGDNVGDTVLFGDNNPASSKPKFGTYWIKDGKVVGVFLEGGTPEENQAIAKVAKVQPPVADVDQLAKEGLSFASKI

SEQ ID NO: 8871 - DNA, 1437 bp, Glycine max
  CDS (1)..(1437)
atggggagagcctttgtgtatgtgattcttggaggaggcgtggctgctggctatgctgctcttgaattcgtcaagaaaggagtctctcatggtgaactctgtattatttccgatgaaccagtggctccttatgaaaggcccgcattgagcaaaggatttttgcttccagaagctgctgcccggcttccatcctttcatacctgtgttggtgcaaatgaggagaggctaactccaaaatggtataaagagcatgggattgaattagttcttggaaccggagttaaatccactgatgtaaaacgtaagacactattaacaacaaccggagagaccataagttacaagattctgattgttgctactggtgctcgggctttgaagctggaagaatttggggtgagtggatcagatgcagaaaatgtctgttatttaagagatatagcagatgcaaataggcttgttgatgttatgcaatcttgtcctggaggtaatgctgttgtcattggtggtggatacataggcatggagtgtgcagcgtctttagtgatcaataaaataaatgtaacaatggtctttcctgaggaacattgcatgggtcgattatttacctcaaagatagcaaactactatgaagaatattataaatcaagaggagtaaacttcattaagggaactgtgctgtcatcatttgattttgattccaatgggaaggttacagctgttaatcttagagatggaaccacgctatctgtggacatggttgtggtgggaattggaatacgtccaaatacagggctgtttgaaggccagcttactttggagaaaggtggaatcaaagtaaatgggatgttgcagtcaagcaacagctcagtctatgccattggagatgttgcagcatttccagtcaaagcatttggggaaacacgaagacttgagcatgttgattcagcacggaaatctgcaagacatgttgtttctgccataatggaaccaaacaaaacgagagaattcgattaccttccttttttctattccagaatcttcacactgtcttggcaattttatggtgataatgttggggaagttgtctattatggagatatgtcaggtagtacatttggagcatactgggtaagcaaggatcaccttgttggggctttccttgaaggcggaactaaagaagagtatgaagccatagccaaggccactaggttaaggccggtaattgaagacttgactgaacttgagagacagggtttgaggtttgctgttacagttagcgagaaaccgatggcctcacccccaattgaggttagggcctcagacctacttttggaaaaaccattatatgcttggcatgctacagctggggttattattgctgcatcaatagctggatttgcatatttttatgggaaaaagcgccacagatggtga

SEQ ID NO: 8872 - protein, 478 aa, Glycine max
MGRAFVYVILGGGVAAGYAALEFVKKGVSHGELCIISDEPVAPYERPALSKGFLLPEAAARLPSFHTCVGANEERLTPKWYKEHGIELVLGTGVKSTDVKRKTLLTTTGETISYKILIVATGARALKLEEFGVSGSDAENVCYLRDIADANRLVDVMQSCPGGNAVVIGGGYIGMECAASLVINKINVTMVFPEEHCMGRLFTSKIANYYEEYYKSRGVNFIKGTVLSSFDFDSNGKVTAVNLRDGTTLSVDMVVVGIGIRPNTGLFEGQLTLEKGGIKVNGMLQSSNSSVYAIGDVAAFPVKAFGETRRLEHVDSARKSARHVVSAIMEPNKTREFDYLPFFYSRIFTLSWQFYGDNVGEVVYYGDMSGSTFGAYWVSKDHLVGAFLEGGTKEEYEAIAKATRLRPVIEDLTELERQGLRFAVTVSEKPMASPPIEVRASDLLLEKPLYAWHATAGVIIAASIAGFAYFYGKKRHRW

SEQ ID NO: 8873 - DNA, 1302 bp, Glycine max
  CDS (1)..(1302)
atggcgaaaaccttcaaatacatcatcctcggtggaggagtttccgctggttatgcggcgagggagtttgccaaacagggcgttaagccaggggagttggctatcatttcgaaagaagcggtagcaccttatgaacgtcctgctctgagcaaggcttacctttttccagagtcccctgctagacttcctgggttccatgtctgtgttggaagtggaggagaaaggttgcttcctgagtggtacacagagaaagggatagagttaattcttagcacagaaatagtaaaggtagaccttgctgcaaaatctctgatcagtgctggaggagaaacattcagttatcagattttgattgttgcaactggctcaacagttataaggctgacagatttcggtgtagaaggagctgatgcgaaaaacatcttttatttgagggaggttgacgatgctgacaaattgtacgcagcaatcaaggcaaagaagaatgggaaagctgtggttgttgggggaggatacattggtctggagcttagtgcagtgttgaaactcaacaatattgatgttaccatggtctacccggagccttggtgtatgccacgactttttacggctggtatagctgaattctatgagggatattacgcaaataagggtgtaaatatcattaaaggaactgttgctgttggattcacttctaattctgatggagaggtaaaagaagtcaaactaaaggatggcagggtcctggaagctgatattgttgttgttggtgttggaggaaggcctcaaacagtcttagtcaaagggcaggttgaagaggagaagggtggaatcaagaccgatgctttcttcaaaactaatctctccgatgtatatgctgttggtgatgttgctactttccctttgaaattatacggtgaattgagaagagttgaacatgttgatcattctcgcaaatcggctgaacaggctgtgaaggccatcaaggcagctgaggaaggaaaaacagttgaggagtatgattaccttccatacttctattcccgttcattcgatctgtcttggcaattctatggcgacaatgtcggcgacacagtgctattcggagacaacaatcctgcgtcttcaaagccaaagtttgggacatactggattaaagacgggaaagttgtcggggtctttctggaaggtggaactcctgaagaaaaccaggctattgctaaagttgctaaggtccagcctccggttgcggatgtaaatcaacttgctaaggaaggcctttcctttgctagtaaaatataa

SEQ ID NO: 8874 - protein, 433 aa, Glycine max
MAKTFKYIILGGGVSAGYAAREFAKQGVKPGELAIISKEAVAPYERPALSKAYLFPESPARLPGFHVCVGSGGERLLPEWYTEKGIELILSTEIVKVDLAAKSLISAGGETFSYQILIVATGSTVIRLTDFGVEGADAKNIFYLREVDDADKLYAAIKAKKNGKAVVVGGGYIGLELSAVLKLNNIDVTMVYPEPWCMPRLFTAGIAEFYEGYYANKGVNIIKGTVAVGFTSNSDGEVKEVKLKDGRVLEADIVVVGVGGRPQTVLVKGQVEEEKGGIKTDAFFKTNLSDVYAVGDVATFPLKLYGELRRVEHVDHSRKSAEQAVKAIKAAEEGKTVEEYDYLPYFYSRSFDLSWQFYGDNVGDTVLFGDNNPASSKPKFGTYWIKDGKVVGVFLEGGTPEENQAIAKVAKVQPPVADVNQLAKEGLSFASKI

SEQ ID NO: 8875 - DNA, 1437 bp, Glycine max
  CDS (1)..(1437)
atggccgcaatatccaactccttatcactgaagcacagtttctctctgagtcgagctcctccttcttcctcttccatcaaattcaaattcagaagatgttacgccgcgttcgccaatgagaatcgcgagtacgtgatcgttggcggcggaaatgccgcgggatatgctgcgcgcactttcgttgagcatggaatggctgatggtcgtctctgtattgtaaccaaagagccgtatgcaccttacgagcgtcccgctctgacgaaagcgtatttgttcccgccggataagaaaccagcacgccttcctggttttcacacttgtgttggatccggtggagagaggcagactccggggtggtataaagagaatgggatagagatgttgtatgaagatccagtaaaagatattgatattgaaaagcatactttgacaacaagttctggaaaacttctgaagtatggttcgcttgttattgctacaggatgtacagcatcaaagtttccagagaaaattgggggaaacctacctggtgttcactatattcgggatgttggagatgccgatgcactaattttatcgttggagaaagcaaaaaaggttgtagttgttggaggtggttatataggaatggaggttgctgctgctgctgttggttggaaacttgatacaacaatcatattcccagaagatcaccttttgcaaagactgtttactccttctcttgcccggagatatgaagaactctatcaaaagaatggagtcaaaatcttgaagggtgcttccataaaaaatttggaagctggttctaatggacatgtagctgctgtgaaacttggagatggatctcttgtggaggcagatacggtaattataggcattggagcaaaacctgctgtgactccctttgagagggtgggcctgaatacagaggttggtggtatacaggttgatggtcagtttcggacaagcactcccggaatctttgctgttggtgatgtagcagctttccctttgaagatttataatcgtatctctcgagtggagcatgtggatcatgcccgtcgctctgcacagcactgtgtgaaagcattactcagtgcacaaactcacacgtatgattatcttccatacttctactcgaggatttttgaatatgaaggaagccctagaaaagtgtggtggcagttctttggagacaatgttggagaaacagttgaaattggaaattttgatcctaaaatatctaccttctggattgaatctggtaagctgaaaggagttcttcttgaaagtgggagccctgaggaatttcaactcctgcctaaacttgccagaagtcagcctctgattgataaagccaaacttcaaaatgcaacatcagtggaggaggccctagagattgctcgggaatccttgcaaggcgaagctgctgtctag

SEQ ID NO: 8876 - protein, 478 aa, Glycine max
MAAISNSLSLKHSFSLSRAPPSSSSIKFKFRRCYAAFANENREYVIVGGGNAAGYAARTFVEHGMADGRLCIVTKEPYAPYERPALTKAYLFPPDKKPARLPGFHTCVGSGGERQTPGWYKENGIEMLYEDPVKDIDIEKHTLTTSSGKLLKYGSLVIATGCTASKFPEKIGGNLPGVHYIRDVGDADALILSLEKAKKVVVVGGGYIGMEVAAAAVGWKLDTTIIFPEDHLLQRLFTPSLARRYEELYQKNGVKILKGASIKNLEAGSNGHVAAVKLGDGSLVEADTVIIGIGAKPAVTPFERVGLNTEVGGIQVDGQFRTSTPGIFAVGDVAAFPLKIYNRISRVEHVDHARRSAQHCVKALLSAQTHTYDYLPYFYSRIFEYEGSPRKVWWQFFGDNVGETVEIGNFDPKISTFWIESGKLKGVLLESGSPEEFQLLPKLARSQPLIDKAKLQNATSVEEALEIARESLQGEAAV

SEQ ID NO: 8877 - DNA, 1302 bp, Glycine max
  CDS (1)..(1302)
atggcgaaaaccttcaaatacatcatcctcggtggaggagtttccgctggttatgcggcgagggagtttgccaaacagggcgttaagccaggggagttggctatcatttcgaaagaagcggtagcaccttatgaacgtcctgctctgagcaaggcttacctttttccagagtcccctgctagacttcctgggttccatgtctgtgttggaagtggaggagaaaggttgcttcctgagtggtacacagagaaagggatagagttaattcttagcacagaaatagtaaaggtagaccttgctgcaaaatctctgatcagtgctggaggagaaacattcagttatcagattttgattgttgcaactggctcaacagttataaggctgacagatttcggtgtagaaggagctgatgcgaaaaacatcttttatttgagggaggttgacgatgctgacaaattgtacgcagcaatcaaggcaaagaagaatgggaaagctgtggttgttgggggaggatacattggtctggagcttagtgcagtgttgaaactcaacaatattgatgttaccatggtctacccggagccttggtgtatgccacgactttttacggctggtatagctgaattctatgagggatattacgcaaataagggtgtaaatatcattaaaggaactgttgctgttggattcacttctaattctgatggagaggtaaaagaagtcaaactaaaggatggcagggtcctggaagctgatattgttgttgttggtgttggaggaaggcctcaaacagtcttagtcaaagggcaggttgaagaggagaagggtggaatcaagaccgatgctttcttcaaaactaatctttccgatgtatatgctgttggtgatgttgctactttccctttgaaattatacggtgaattgagaagagttgaacatgttgatcattctcgcaaatcggctgaacaggctgtgaaggccatcaaggcagctgaggaaggaagaacagttgaggagtatgattaccttccatacttctattcccgttcatttgatctgtcttggcaattctatggcgacaatgtcggcgacacagtactattcggagacaacaatcctgcgtcgtcaaagcctaagtttgggacatactggattaaagatgggaaagttgttggggtctttctggaaggtggaactcctgaagagaaccaggctattgctaaagttgctaaggtccagcctccggttgcagatgtagatcaacttgctaaggaaggcctttcctttgctagtaaaatataa

SEQ ID NO: 8878 - protein, 433 aa, Glycine max
MAKTFKYIILGGGVSAGYAAREFAKQGVKPGELAIISKEAVAPYERPALSKAYLFPESPARLPGFHVCVGSGGERLLPEWYTEKGIELILSTEIVKVDLAAKSLISAGGETFSYQILIVATGSTVIRLTDFGVEGADAKNIFYLREVDDADKLYAAIKAKKNGKAVVVGGGYIGLELSAVLKLNNIDVTMVYPEPWCMPRLFTAGIAEFYEGYYANKGVNIIKGTVAVGFTSNSDGEVKEVKLKDGRVLEADIVVVGVGGRPQTVLVKGQVEEEKGGIKTDAFFKTNLSDVYAVGDVATFPLKLYGELRRVEHVDHSRKSAEQAVKAIKAAEEGRTVEEYDYLPYFYSRSFDLSWQFYGDNVGDTVLFGDNNPASSKPKFGTYWIKDGKVVGVFLEGGTPEENQAIAKVAKVQPPVADVDQLAKEGLSFASKI

SEQ ID NO: 8879 - DNA, 1341 bp, Oryza sativa
  CDS (1)..(1341)
atgggccgcgcgttcgagtacgtgatcctgggcggcggcgtggccgccggctacgcggcgctcgagttcgtccgccgcaacggcggcgcatccagccaggagctctgcatcatctccgacgagcactttgctccttatgagcgtcctgcattaagcaaaggctatttgctcccacaagacgcgccgcgtctaccggcatttcatacttgcgttggttctaaggatgagttacttaccgaagaatggtacaacgaacacggcattgtacttgttcttggaacgagggtgatttctgctgatgtgcggcagaagacattgcttacatccagtggggaaaccatcagctataaaactcttatcgttgccacgggtgctcgggccgtgaagctggaagaatttggagtgagcggttcagatgcgaggaacgtctgctatctgcgcaatgtggaggatgcagacaaattagtcggtgtaatgagatcatgtcccggtggaaatgccgttgtcgtcggtggtggatacataggaatggaatgtgcagcggcattggtcacaaacaacataaaagttaccatggtcttccctaaaaaacactgcatgggtcgtctttttacaccgaaaattgctgagttttatgagagctattacgcttcaagaggagttactttcgtcaaagaagctgcggttacttccatgcagatatcagctggaaaggtgactgcagtgaacttgggaaacggtaggcggcttcctgccgacatggtcgtcgtcggcgtcggcgcccgcgcgaacaccgggctgttcgacggccagctggtcatggagaacggcgggatcaaggtgaacggacggatgcaggcgagcgacgcctcggtgtacgccgtgggccacgtggccgcgttccccgtcaagctgttcgggcggggacgtcccgccgggtggagcacggtcttctcgctgtcgtggcagttttacggcgacaacgccggggaagccgtgcacttcggggacctcgcgccgcccggcgacggcgacggcgccgcccccaagttcggcgcgtactgggtccgcgacggccgcgtcgccggcgcgttcctcgagggcgggagccggcaggagtacgaggccgtggcggccgccgtccgccgcggggccgcggtggccgacgtcgcggagctcgagaggcgaggcctcgcgttcgccacccaggccaccggcggcggtggcaagcccacctgcgcatggcacgccacggtgggcgtcgccgcggccgtgtccatcgccgccttcgcctgctggtacggctggcaggcgccgtacgtgctcaagcgagacttctga

SEQ ID NO: 8880 - protein, 446 aa, Oryza sativa
MGRAFEYVILGGGVAAGYAALEFVRRNGGASSQELCIISDEHFAPYERPALSKGYLLPQDAPRLPAFHTCVGSKDELLTEEWYNEHGIVLVLGTRVISADVRQKTLLTSSGETISYKTLIVATGARAVKLEEFGVSGSDARNVCYLRNVEDADKLVGVMRSCPGGNAVVVGGGYIGMECAAALVTNNIKVTMVFPKKHCMGRLFTPKIAEFYESYYASRGVTFVKEAAVTSMQISAGKVTAVNLGNGRRLPADMVVVGVGARANTGLFDGQLVMENGGIKVNGRMQASDASVYAVGHVAAFPVKLFGRGRPAGWSTVFSLSWQFYGDNAGEAVHFGDLAPPGDGDGAAPKFGAYWVRDGRVAGAFLEGGSRQEYEAVAAAVRRGAAVADVAELERRGLAFATQATGGGGKPTCAWHATVGVAAAVSIAAFACWYGWQAPYVLKRDF

SEQ ID NO: 8881 - DNA, 1467 bp, Zea mays
  CDS (1)..(1467)
atggcttccgcggcgacacagtgcttcagctactcctcgttgccggccacgtgggctctgcggcagcggggcggcggtgccagcgtgctccggctctcttcccggcggaccttctcggtctccgcggcggccgggttcgacaaccagaaccgcgagtatgtgatcgtcgggggagggaacgctgcgggttacgccgccaggacgttcgtcgagcatggcatggctgacggccgcctttgcatcgtctccaaggagccagttccaccatacgagcggccagccttgaccaaaggctatctttttcctccggacaagaaaccggctcgcctacctggtttccatacatgcgttggatctggtggacagcgacagactgctgaatggtacaaggagaatggtatagaggtgctgtatgaggatccagttgtagcatttgatggcaaaacgcaaaccttaaagacttcatcggggaaagttctgaaatacggctcacttattatttctactggatgtgaagcatcgagattacctgagaaaattggagggaaattacctggagttcactacatacgggatgttgctgatgctgatgctctagtatcctcattgggaagtgcaaagaaggtggtggttattggtgggggctatattggcatggaggtagctgcagcagcttgtggctggaatcttgacacaactattatattcccagaggaccacattatgccaagattatttacaccctcgcttgctaagaagtatgaggaactgtatcagcaaaatggtgtcaaattcataaagggagctcttatcgaaaaacttggagctggctctgatggaagggtgtcttctgcagtacttaaggatggatctgtagttgaagctgatacagtaattgttggtataggagcaaaaccagttgtcagcccgtttgaagctgttggagttaaccctaaagttggtggaatagaggttgattccttgttcagaactagtgtacctggcatctttgcaattggagatgtagcagcgttccccctgaagatgtacaatagaattgctcgagtggaacatgtggatcatgctcggaagtctgcgcaccactgtgtagagacgctcctaacatcccagacaaaagcgtatgactaccttccatacttctactcgagggtttttgagtacgagggaagttcgaggaaagtctggtggcagttttatggcgacaatgtcggcgaagcagtcgaagtagggaactttgatccaaaggttgcgactttctggatcgactctgatagccggctgaagggtgttttcctcgagagtggaacctcagaggaattctcgcttcttccgcagctcgccaaatctcagcctgttgttgacaagtcaaagctccaggccgcgacttctgttgaagatgcattagagattgcaagaagctcactccggtccagtgccatggtttag

SEQ ID NO: 8882 - protein, 488 aa, Zea mays
MASAATQCFSYSSLPATWALRQRGGGASVLRLSSRRTFSVSAAAGFDNQNREYVIVGGGNAAGYAARTFVEHGMADGRLCIVSKEPVPPYERPALTKGYLFPPDKKPARLPGFHTCVGSGGQRQTAEWYKENGIEVLYEDPVVAFDGKTQTLKTSSGKVLKYGSLIISTGCEASRLPEKIGGKLPGVHYIRDVADADALVSSLGSAKKVVVIGGGYIGMEVAAAACGWNLDTTIIFPEDHIMPRLFTPSLAKKYEELYQQNGVKFIKGALIEKLGAGSDGRVSSAVLKDGSVVEADTVIVGIGAKPVVSPFEAVGVNPKVGGIEVDSLFRTSVPGIFAIGDVAAFPLKMYNRIARVEHVDHARKSAHHCVETLLTSQTKAYDYLPYFYSRVFEYEGSSRKVWWQFYGDNVGEAVEVGNFDPKVATFWIDSDSRLKGVFLESGTSEEFSLLPQLAKSQPVVDKSKLQAATSVEDALEIARSSLRSSAMV

SEQ ID NO: 8883 - DNA, 1500 bp, Zea mays
  CDS (1)..(1500)
atgacttcagctctccggcggaaggcggcgcagatggcttccgcggcgacacagtgcttcagctactcctcgttgccggccacgtgggctctgcggcagcggggcggcggtgccagcgtgctccggctctcttcccggcggaccttctcggtctccgcggcggccgggttcgacaaccagaaccgcgagtatgtgatcgtcgggggagggaacgctgcgggttacgccgccaggacgttcgtcgagcatggcatggctgacggccgcctttgcatcgtctccaaggagccagttccaccatacgagcggccagccttgaccaaaggctatctttttcctccggacaagaaaccggctcgcctacctggtttccatacatgcgttggatctggtggacagcgacagactgctgaatggtacaaggagaatggtatagaggtgctgtatgaggatccagttgtagcatttgatggcaaaacgcaaaccttaaagacttcatcggggaaagttctgaaatacggctcacttattatttctactggatgtgaagcatcgagattacctgagaaaattggagggaaattacctggagttcactacatacgggatgttgctgatgctgatgctctagtatcctcattgggaagtgcaaagaaggtggtggttattggtgggggctatattggcatggaggtagctgcagcagcttgtggctggaatcttgacacaactattatattcccagaggaccacattatgccaagattatttacaccctcgcttgctaagaagtatgaggaactgtatcagcaaaatggtgtcaaattcataaagggagctcttatcgaaaaacttggagctggctctgatggaagggtgtcttctgcagtacttaaggatggatctgtagttgaagctgatacagtaattgttggtataggagcaaaaccagttgtcagcccgtttgaagctgttggagttaaccctaaagttggtggaatagaggttgattccttgttcagaactagtgtacctggcatctttgcaattggagatgtagcagcgttccccctgaagatgtacaatagaattgctcgagtggaacatgtggatcatgctcggaagtccgcacaccactgtatagagacgctcctaacatcccagacaaaagcgtatgactaccttccatacttctactcgagggtttttgagtacgagggaagttcgaggaaagtctggtggcagttttatggcgacaatgtcggcgaagcagtcgaagtagggaactttgatccaaaggttgcgactttctggatcgactctgatagccggctgaagggtgttttcctcgagagtggaacctcagaggaattctcgcttcttccgcagctcgccaaatctcagcctgttgttgacaagtcaaagctccaggccgcgacttctgttgaagatgcattagagattgcaagaagctcactccggtccagcgccacggtttag

SEQ ID NO: 8884 - protein, 499 aa, Zea mays
MTSALRRKAAQMASAATQCFSYSSLPATWALRQRGGGASVLRLSSRRTFSVSAAAGFDNQNREYVIVGGGNAAGYAARTFVEHGMADGRLCIVSKEPVPPYERPALTKGYLFPPDKKPARLPGFHTCVGSGGQRQTAEWYKENGIEVLYEDPVVAFDGKTQTLKTSSGKVLKYGSLIISTGCEASRLPEKIGGKLPGVHYIRDVADADALVSSLGSAKKVVVIGGGYIGMEVAAAACGWNLDTTIIFPEDHIMPRLFTPSLAKKYEELYQQNGVKFIKGALIEKLGAGSDGRVSSAVLKDGSVVEADTVIVGIGAKPVVSPFEAVGVNPKVGGIEVDSLFRTSVPGIFAIGDVAAFPLKMYNRIARVEHVDHARKSAHHCIETLLTSQTKAYDYLPYFYSRVFEYEGSSRKVWWQFYGDNVGEAVEVGNFDPKVATFWIDSDSRLKGVFLESGTSEEFSLLPQLAKSQPVVDKSKLQAATSVEDALEIARSSLRSSATV

SEQ ID NO: 8885 - DNA, 1431 bp, Triticum aestivum
  CDS (1)..(1431)
atggggcgcgcgttcgtgtacgtcgtcctgggcggcggcgtggccgcgggctacgcggcgctcgagttcgcccgccgcggcggctactcccgcggcgagctctgcatcatctccgaagaggccgttgctccttatgaacgccctgcattaagcaaaggctatttactcccagaagatccttctcggcttccaaaattccatacttgtgttggagctaatgatgagttactgacgacaaaatggtacaaggaacaaggtattgaacttgttcttggaacaagagtgatatctgctgatgtgagacggaagacattgcttacagcaactggagaaactatcagctataagacgcttataattgcaacaggtgctcgggctttgaagctggaagagtttggaataagcggttcagatgctgcaaacatatgttatttgcgcaatcttgaagacgcggataaattagtgaatgcgatgagctcatgttctggtggaaatgctgttgtcatcggtggtggctacataggaatggaatgtgcagcagcattggttactaataagataaaagtaaccatggtcttccctgaaaaacactgcatgggtcggctatttacagaaaaaattgcagaatattatgaaagctactacactttgaaaggagttacttttaccaaaggaactgtgcttacatcctttgaaaaagactcaacagggaaggtgacttcagtaatcctaaaagatggcaaccaccttcctgctgatatggtagtagttggtattgggatccgtgcaaataccagcctttttgaaggccagctgctgatggagaagggcggcattaaggtaaatgggcaaatgcaaactagcgacagctccgtgtatgctgttggtgatgttgccgcgttccccatcaagctctttgacggtgatatccgacggcttgagcatgttgactcggctcgtagaaccgccagacatgccgtcgcagccatcctggagccttccaaaagcagggacgtcgattacctgccattcttctactccagagtcttcacactgtcctggcagttctatggagacaatgtcggagaagtaattcactacggcgacttcacgagcaacagccctcggttcggcgcatactgggtcagcaagggccagatcacgggcgcgttcctggaaggcggggaccgggacgactacgaggcgttatcggtggttgtctggcgtaaaaccaaggtctcggacatgtctgaacttgaaagacaaggcctggcatttgccatccaggaaagcaagaaagacgtgcctgacagcggggtcaccctcggcgagaagcccaccttcgtgtggtacgcgacggcgggggttgttgcggccgtctcgatctccgcgttcggttattggtacggcaggaagcgccgcaggtggtga

SEQ ID NO: 8886 - protein, 476 aa, Triticum aestivum
MGRAFVYVVLGGGVAAGYAALEFARRGGYSRGELCIISEEAVAPYERPALSKGYLLPEDPSRLPKFHTCVGANDELLTTKWYKEQGIELVLGTRVISADVRRKTLLTATGETISYKTLIIATGARALKLEEFGISGSDAANICYLRNLEDADKLVNAMSSCSGGNAVVIGGGYIGMECAAALVTNKIKVTMVFPEKHCMGRLFTEKIAEYYESYYTLKGVTFTKGTVLTSFEKDSTGKVTSVILKDGNHLPADMVVVGIGIRANTSLFEGQLLMEKGGIKVNGQMQTSDSSVYAVGDVAAFPIKLFDGDIRRLEHVDSARRTARHAVAAILEPSKSRDVDYLPFFYSRVFTLSWQFYGDNVGEVIHYGDFTSNSPRFGAYWVSKGQITGAFLEGGDRDDYEALSVVVWRKTKVSDMSELERQGLAFAIQESKKDVPDSGVTLGEKPTFVWYATAGVVAAVSISAFGYWYGRKRRRW

SEQ ID NO: 8887 - DNA, 1458 bp, Triticum aestivum
  CDS (1)..(1458)
atggcttccgcggcggcggctgcggcggcggggacggggtgctactcgcagacgtcctgggcgctgcgacgccttggcgccggaggcggcgccctcgcatcggcggccacccgcaggaggaactgctccgtcgcggccgccgtctttgacaaccagaaccgcgagtacgtgatcgtgggcggcgggaacgcggcgggctacgcggccaggacgttcgtcgagcatggcatggccgacggccgcctctgcatcgtctccaaagaggctgttccaccatacgagcgaccggcactgaccaaaggctatctgtttccaccagaaaaaaagccggcacgcctacctggattccatacctgtgttggatctggtggccagaggcagactgccgaatggtacaaggagaatggcatagaggtgctgtatgaggatccagttgaagcatttgatggcaaaacacagaccttgaaaacttcatcagggaaaattctgaagtatgggtcacttatcatttctactggttgtgcagctgcaagactacctgagaaaattggaggagacttacctggagttcactatatacgtgatgttgctgatgctgattctctagtatcttcattgggaaaagcaaagaaaattgttgttattggtgggggctatattggcatggaggtggctgctgcagcttgtggctggaatcttgacacaactataatattcccagaagatcacataatgccaagattgtttacgccttcccttgctaagaagtatgaggaactgtatgagcaaaatggcgttaaattcgtaaagggagctcttattgacaaacttgatgctggctctgatggaagggtgtcttcagctatacttaaagatggttctgttgttgaagctgatacagttattgttggtataggagcaaaaccatctgtcagccccttcgaagctgtgggagttaacatcgaagttggtggaatagaggttgattccatgtttagaacaagtatacctagcatctttgctattggagatgtggcagcttttccgctcaagatgtatgatagaatagctcgagtggagcatgtggatcatgccagaaagtctgcacaacattgtatagaaacactgttaacatcccaggcaaaagcgtatgactaccttccgtatttctattctcgagtttttgagtatgaaggaagctccaggaaaatttggtggcaattctacggagataacgttggtgaaacaattgaagtagggaactttgatcctaaaattgctaccttctggattgactctgatagtcgattgaagggtgttttccttgagagtggaacctcagaggaattctcgcttcttccaaagctcgcgagatcacagcccattgtcgacaaagctaagctcaagagtgcgacttcagtcgaagatgcattagagattgcgagaagctctctttag

SEQ ID NO: 8888 - protein, 485 aa, Triticum aestivum
MASAAAAAAAGTGCYSQTSWALRRLGAGGGALASAATRRRNCSVAAAVFDNQNREYVIVGGGNAAGYAARTFVEHGMADGRLCIVSKEAVPPYERPALTKGYLFPPEKKPARLPGFHTCVGSGGQRQTAEWYKENGIEVLYEDPVEAFDGKTQTLKTSSGKILKYGSLIISTGCAAARLPEKIGGDLPGVHYIRDVADADSLVSSLGKAKKIVVIGGGYIGMEVAAAACGWNLDTTIIFPEDHIMPRLFTPSLAKKYEELYEQNGVKFVKGALIDKLDAGSDGRVSSAILKDGSVVEADTVIVGIGAKPSVSPFEAVGVNIEVGGIEVDSMFRTSIPSIFAIGDVAAFPLKMYDRIARVEHVDHARKSAQHCIETLLTSQAKAYDYLPYFYSRVFEYEGSSRKIWWQFYGDNVGETIEVGNFDPKIATFWIDSDSRLKGVFLESGTSEEFSLLPKLARSQPIVDKAKLKSATSVEDALEIARSSL

SEQ ID NO: 8889 - DNA, 1308 bp, Triticum aestivum
  CDS (1)..(1308)
atggcgtccgggaagcacttcaagtacatcgtcctcggcggcggcgtctccggggggtacgcggcgcgggagttcgccaaacagggggtgcagccgggggagctcgccatcatctccaaggaggcagtggctccttacgagcgccctgccctcagcaaggcatacctgttccctcagagtcctgcaagattgccaggattccatgtgtgcgtgggaagtggaggcgagaggctcctgcctgaatggtactcagagaaaggcatcgagcttatcctgagcactgaaattgtcaaagctgatcttccttccaagactctgactagtgcagctggagcaacctttacatacgagatcttgctaattgctactggctcctcagtcattaagctctctgattttggcactcaaggagctgattctaacaacattctgtacctgagggaaattgacgacgcggacaacctgtatgcagctatccaagcaaagaagggtgggaaggcagtggttgttggaggaggttacattggccttgaactaagcgcagtattgaagatgaacgatcttgatgtgactatggtgttccctgaaccttggtgcatgcctcgtctcttcactgccgagattgcagctttctacgagagttactatactaacaaaggagtcaagatcttgaagggtacaattgctgttggttttgatgctgacgccaatggtgatgtgaccgcagttaagctaaaggacggcagtgtgctcgaagctgatattgttgtcgtcggtgttgggggcagaccgttgactactctcttcaaaggccaagttgccgaggagaaaggtggaatcaagaccgatgcttttttcgaaacaagtgtccccggagtgtatgccgtcggcgacgtggccaccttcccgatgaagatctacaacgacgagaggagagtggagcatgtcgaccattccaggaagtccgcggagcaggctgtgaaggcaatcaaggggaaagaggcgggttccgccgtggaggagtacgactacctgccctacttctactcgcggtcgttcgacctgtcatggcagttctacggggacaatgtcggcgacgccatcctgttcggcgatgccgaccccggctcggccaagcccaagttcgggtcgtactgggttaaggacggcaagtgcgtgggcgcgttcctggagggcgggtcgccggacgagaacgccgccatcgccaagctcgcgagggcccagctgcctgccgccagccccgacgagctcaaggccgccggcctccagttcgccagcaagatctga

SEQ ID NO: 8890 - protein, 435 aa, Triticum aestivum
MASGKHFKYIVLGGGVSGGYAAREFAKQGVQPGELAIISKEAVAPYERPALSKAYLFPQSPARLPGFHVCVGSGGERLLPEWYSEKGIELILSTEIVKADLPSKTLTSAAGATFTYEILLIATGSSVIKLSDFGTQGADSNNILYLREIDDADNLYAAIQAKKGGKAVVVGGGYIGLELSAVLKMNDLDVTMVFPEPWCMPRLFTAEIAAFYESYYTNKGVKILKGTIAVGFDADANGDVTAVKLKDGSVLEADIVVVGVGGRPLTTLFKGQVAEEKGGIKTDAFFETSVPGVYAVGDVATFPMKIYNDERRVEHVDHSRKSAEQAVKAIKGKEAGSAVEEYDYLPYFYSRSFDLSWQFYGDNVGDAILFGDADPGSAKPKFGSYWVKDGKCVGAFLEGGSPDENAAIAKLARAQLPAASPDELKAAGLQFASKI

SEQ ID NO: 8891 - DNA, 1308 bp, Triticum aestivum
  CDS (1)..(1308)
atggcgtcggagaagcacttcaagtacgtcatcctcggcggcggcgtcgcggcgggatacgccgcgagggagttcggcaagcagggcgtccagcccggggagctcgccatcatctccaaggagtccgtggctccgtatgagcgccctgcgctcagcaagggctacctctttccccagaatgccgccaggcttccaggattccacacctgcgtcgggggcggcggggagaagctcttgcccgaatggtacacggaaaaaggcattgagctgatcctgagcaccgaaattgtcaaggctgatcttgcctccaagacattgaccagtgcagctggagcaaccttcacctatgagaccttgctcattgccactggctcctcgaccataaagctcattgactttggcgttcaaggagcagaatcaaacaacatattgtatctaagggaaattgatgacgccgacaagttggtcgcagctatgcaagcaaagaaggatgggaaggccgtcgttgttggaggtggctacataggacttgagctcagcgcagcactgaaaatcaacaatttcgatgtcactatggtgtacccagagccgtggtgcatgccccgtctcttcactgccggcattgctcatttctacgagggttactacgctagcaaaggaatcaatatcgtgaagggtactgtggctagtggttttgatgctgatgccaatggagatgttagtgtggtgaagctgaaggatggaagagtactcgatgccgacatcgtcatcgttggagtcggtggcaggccgctgacaggcctcttcaaaggccaagttgaagaggagaagggtggactcaagaccgacacattcttcgaaacaagcgttgctggtgtatatgccatcggtgatgtggcgactttccccatgaaactgtacgacgagccgaggagagtggagcacgtcgaccatgctcggaaatcagccgagcaggcagtaaaggcgatcaaggccaaggagtccggcgagtctgtggcggagtacgactacctgccctacttctactccaggtcgttcgacgtcgcgtggcagttctacggcgacaacgttggcgagacggtgctgttcggggacaacgacccagcggcggccaagcccaagttcggcacctactgggtcaaggacggcaaggtcatcggtgtgttcctagagggcggctccgccgacgagaatcaggccatcgccaaggtcgccagggcccagccgccggtggacgacgtggaggcgctcggcaaggaaggccttgatttcgccaccaagatctga

SEQ ID NO: 8892 - protein, 435 aa, Triticum aestivum
MASEKHFKYVILGGGVAAGYAAREFGKQGVQPGELAIISKESVAPYERPALSKGYLFPQNAARLPGFHTCVGGGGEKLLPEWYTEKGIELILSTEIVKADLASKTLTSAAGATFTYETLLIATGSSTIKLIDFGVQGAESNNILYLREIDDADKLVAAMQAKKDGKAVVVGGGYIGLELSAALKINNFDVTMVYPEPWCMPRLFTAGIAHFYEGYYASKGINIVKGTVASGFDADANGDVSVVKLKDGRVLDADIVIVGVGGRPLTGLFKGQVEEEKGGLKTDTFFETSVAGVYAIGDVATFPMKLYDEPRRVEHVDHARKSAEQAVKAIKAKESGESVAEYDYLPYFYSRSFDVAWQFYGDNVGETVLFGDNDPAAAKPKFGTYWVKDGKVIGVFLEGGSADENQAIAKVARAQPPVDDVEALGKEGLDFATKI

SEQ ID NO: 8893 - DNA, 1302 bp, Zea mays
  CDS (1)..(1302)
atggctaggcacttcaagtacgtcatcctcggcggcggtgtcgcggcggggtacgcggcgagggagttcgccaagcagggcgtcaaccccggcgagctcgccatcatctccaaggaaccagtggccccttatgagcgccctgcactcagcaagggatacctcttccctcagaacgctgcaagactgccaggcttccacacgtgtgtgggcagcggtggagagagactacttcctgaatggtactctgagaaaggcattgaactgatcctgagtactgagattgtgaaggccgaccttgcttcaaagactctgaccagtgcagctgcagaaaccttcacatatgagaccttgctcattgctacgggctcctcggtcataaagctcactgattttggtgttcaaggagcagaatccaacaacatattgtatctaagggacattgcggatgccgacaagttggttgcagctatgcaggcaaagaagggtggaaaggctgtgattgttggaggtggttacatagggcttgagcttagcgctgccttgaaaatcaacaacttcgatgtgaccatggtgtaccctgaaccgtggtgcatgccccgtctcttcactgctggtattgctcatttctatgagggctactatgctaacaaaggaatcaaggttgtaaagggcacggttgctgttggtttcgacgctgatgccaacggagatgtcactacagtgaagttgaagaatggaagtgttctcgaagctgatattgttattgttggcgtcggcggcaggccattgacgcgtctcttcataggccaagctgctgacgagaaaggtggactcaagaccgatgcattcttcgaaacaagtgtagccggggtatacgcgatcggcgacgtggccaccttccctctgaagctctacaacgagcagaggagagttgagcacgtggaccacgcccggaagtccgccgagcaggccgtgagggcaatcaaggccaaggagtccggcgaatcggtggccgaatacgactacctgccctacttctactcccggtcgttcgacttggcgtggcagttctacggcgacaacgtcggcgacgacgtgctgttcggcgacaacgacccggcctcggccaagcccaagttcggcagctactgggtgaaggacggcaaggtcgtcggcgtgtttctcgagggcgggtcggccgaggagaaccaggccatcgccagggtcgccagggcgcagccgccggtggccgacgtccaggcgctgaagcaggaggggatcgagttcgcttccaaaatctga

SEQ ID NO: 8894 - protein, 433 aa, Zea mays
MARHFKYVILGGGVAAGYAAREFAKQGVNPGELAIISKEPVAPYERPALSKGYLFPQNAARLPGFHTCVGSGGERLLPEWYSEKGIELILSTEIVKADLASKTLTSAAAETFTYETLLIATGSSVIKLTDFGVQGAESNNILYLRDIADADKLVAAMQAKKGGKAVIVGGGYIGLELSAALKINNFDVTMVYPEPWCMPRLFTAGIAHFYEGYYANKGIKVVKGTVAVGFDADANGDVTTVKLKNGSVLEADIVIVGVGGRPLTRLFIGQAADEKGGLKTDAFFETSVAGVYAIGDVATFPLKLYNEQRRVEHVDHARKSAEQAVRAIKAKESGESVAEYDYLPYFYSRSFDLAWQFYGDNVGDDVLFGDNDPASAKPKFGSYWVKDGKVVGVFLEGGSAEENQAIARVARAQPPVADVQALKQEGIEFASKI

SEQ ID NO: 8895 - DNA, 1308 bp, Zea mays
  CDS (1)..(1308)
atggcgtccgaaaagcacttcaagtacgtcatcctcggcggcggcgtcgcggcggggtacgcggcgcgggagttcgccaagcagggagttaagcctggggagcttgcaatcatctccaaggaggctgtggctccttacgagcgtcctgccctaagcaaaggttacctctttcctacgaatgctgcaagactcccaggattttatgtatgtgtgggaagtggtggagagaagctattgcctgagtggtactcagagaaaggcattgagctgatccttagtacagaaattgtcaaagctgatctttccaccaagactctgactagtgcagctggagcaaactttacatatgagatcttgctcattgctactggctcctcggtcataaagctcaccgattttggcacacaaggagctgattctaacaacattctatatctaagggaaattgatgatgctgacaagctggttgcagctatccaggcaaagaagggtggcaaggcagtggttgttggaggaggttatatcggcctcgaactgagtgcagccctgaagatcaatgactttgatgtcactatggtgtttcctgaaccttggtgcatgcctcgcctcttcactgccgatattgctgctttctatgaggcttactatactaacaaaggtgtaaagatcttgaagggcacgctagctgttggttttgatgctgatgccaatggtgatgtcactgcagttaagctaaaggatggcacagtacttgaagccgatattgttgttgtcggtgttggaggcagaccattgactactctcttcaagggtcaagttgctgaggagaagggtggaatcaagactgacgcttcctttgaaacaagcgttcctggagtatatgccattggtgatgtggctaccttccctttgaagatgtacaatgagttgaggagagtggaacatgttgaccattctagaaagtctgcagagcaggctgtaaaggcgatcaagggcaaagagtccggtgaaccagttccggagtatgactacctgccatacttctactcccgatcattcgacctggcgtggcaattctacggcgacaacgtgggcgaaaccatcctgtttggcgacagtgaccccacctccagcaagcccaagttcggctcgtactggatcaaggacggcaaggtcttgggcgccttcctggagggcgggtcaccggacgagaacaaggccattgccaaggtggcgaaaacccagccgccggtcgctaacctcgaggagctcaagaaggatggcctccagttcgccagcaagatctga

SEQ ID NO: 8896 - protein, 435 aa, Zea mays
MASEKHFKYVILGGGVAAGYAAREFAKQGVKPGELAIISKEAVAPYERPALSKGYLFPTNAARLPGFYVCVGSGGEKLLPEWYSEKGIELILSTEIVKADLSTKTLTSAAGANFTYEILLIATGSSVIKLTDFGTQGADSNNILYLREIDDADKLVAAIQAKKGGKAVVVGGGYIGLELSAALKINDFDVTMVFPEPWCMPRLFTADIAAFYEAYYTNKGVKILKGTLAVGFDADANGDVTAVKLKDGTVLEADIVVVGVGGRPLTTLFKGQVAEEKGGIKTDASFETSVPGVYAIGDVATFPLKMYNELRRVEHVDHSRKSAEQAVKAIKGKESGEPVPEYDYLPYFYSRSFDLAWQFYGDNVGETILFGDSDPTSSKPKFGSYWIKDGKVLGAFLEGGSPDENKAIAKVAKTQPPVANLEELKKDGLQFASKI

SEQ ID NO: 8897 - DNA, 20 bp, Artificial sequence
  primer
atggcgttagcatcaaccac

SEQ ID NO: 8898 - DNA, 21 bp, Artificial sequence
  primer
ctaactctgtagagcggcttg

SEQ ID NO: 8899 - protein, 527 aa, Artificial sequence
  consensus sequence
  Variant (4)..(4): Xaa in position 4 is any amino acid
  Variant (8)..(9): Xaa in position 8 to 9 is any amino acid
  Variant (15)..(16): Xaa in position 15 to 16 is any amino acid
  Variant (18)..(23): Xaa in position 18 to 23 is any amino acid
  Variant (24)..(28): Xaa in position 24 to 28 is any or no amino acid
  Variant (30)..(30): Xaa in position 30 is any amino acid
  Variant (32)..(32): Xaa in position 32 is any amino acid
  Variant (34)..(34): Xaa in position 34 is any amino acid
  Variant (36)..(36): Xaa in position 36 is any amino acid
  Variant (38)..(40): Xaa in position 38 to 40 is any amino acid
  Variant (48)..(48): Xaa in position 48 is any amino acid
  Variant (50)..(50): Xaa in position 50 is any amino acid
  Variant (53)..(53): Xaa in position 53 is any amino acid
  Variant (55)..(55): Xaa in position 55 is any amino acid
  Variant (56)..(59): Xaa in position 56 to 59 is any or no amino acid
  Variant (64)..(64): Xaa in position 64 is any amino acid
  Variant (67)..(67): Xaa in position 67 is any amino acid
  Variant (71)..(71): Xaa in position 71 is any amino acid
  Variant (73)..(73): Xaa in position 73 is any amino acid
  Variant (75)..(79): Xaa in position 75 to 79 is any amino acid
  Variant (82)..(82): Xaa in position 82 is any amino acid
  Variant (84)..(84): Xaa in position 84 is any amino acid
  Variant (88)..(97): Xaa in position 88 to 97 is any amino acid
  Variant (99)..(102): Xaa in position 99 to 102 is any amino acid
  Variant (105)..(108): Xaa in position 105 to 108 is any amino acid
  Variant (110)..(113): Xaa in position 110 to 113 is any amino acid
  Variant (115)..(116): Xaa in position 115 to 116 is any amino acid
  Variant (117)..(117): Xaa in position 117 is any or no amino acid
  Variant (119)..(120): Xaa in position 119 to 120 is any amino acid
  Variant (124)..(128): Xaa in position 124 to 128 is any amino acid
  Variant (130)..(134): Xaa in position 130 to 134 is any amino acid
  Variant (135)..(135): Xaa in position 135 is any or no amino acid
  Variant (137)..(142): Xaa in position 137 to 142 is any amino acid
  Variant (143)..(144): Xaa in position 143 to 144 is any or no amino acid
  Variant (146)..(146): Xaa in position 146 is any amino acid
  Variant (148)..(150): Xaa in position 148 to 150 is any amino acid
  Variant (154)..(154): Xaa in position 154 is any amino acid
  Variant (156)..(165): Xaa in position 156 to 165 is any amino acid
  Variant (166)..(169): Xaa in position 166 to 169 is any or no amino acid
  Variant (171)..(172): Xaa in position 171 to 172 is any amino acid
  Variant (179)..(179): Xaa in position 179 is any amino acid
  Variant (181)..(182): Xaa in position 181 to 182 is any amino acid
  Variant (184)..(192): Xaa in position 184 to 192 is any amino acid
  Variant (193)..(194): Xaa in position 193 to 194 is any or no amino acid
  Variant (196)..(198): Xaa in position 196 to 198 is any amino acid
  Variant (201)..(203): Xaa in position 201 to 203 is any amino acid
  Variant (205)..(205): Xaa in position 205 is any amino acid
  Variant (210)..(212): Xaa in position 210 to 212 is any amino acid
  Variant (214)..(215): Xaa in position 214 to 215 is any amino acid
  Variant (218)..(219): Xaa in position 218 to 219 is any amino acid
  Variant (221)..(223): Xaa in position 221 to 223 is any amino acid
  Variant (225)..(228): Xaa in position 225 to 228 is any amino acid
  Variant (231)..(240): Xaa in position 231 to 240 is any amino acid
  Variant (241)..(247): Xaa in position 241 to 247 is any or no amino acid
  Variant (249)..(249): Xaa in position 249 is any amino acid
  Variant (251)..(252): Xaa in position 251 to 252 is any amino acid
  Variant (254)..(254): Xaa in position 254 is any amino acid
  Variant (256)..(257): Xaa in position 256 to 257 is any amino acid
  Variant (259)..(262): Xaa in position 259 to 262 is any amino acid
  Variant (265)..(265): Xaa in position 265 is any amino acid
  Variant (267)..(267): Xaa in position 267 is any amino acid
  Variant (268)..(296): Xaa in position 268 to 296 is any or no amino acid
  Variant (299)..(299): Xaa in position 299 is any amino acid
  Variant (301)..(302): Xaa in position 301 to 302 is any amino acid
  Variant (304)..(306): Xaa in position 304 to 306 is any amino acid
  Variant (307)..(307): Xaa in position 307 is any or no amino acid
  Variant (309)..(316): Xaa in position 309 to 316 is any amino acid
  Variant (317)..(320): Xaa in position 317 to 320 is any or no amino acid
  Variant (324)..(325): Xaa in position 324 to 325 is any amino acid
  Variant (327)..(328): Xaa in position 327 to 328 is any amino acid
  Variant (330)..(337): Xaa in position 330 to 337 is any amino acid
  Variant (338)..(342): Xaa in position 338 to 342 is any or no amino acid
  Variant (344)..(344): Xaa in position 344 is any amino acid
  Variant (349)..(349): Xaa in position 349 is any amino acid
  Variant (352)..(352): Xaa in position 352 is any amino acid
  Variant (354)..(356): Xaa in position 354 to 356 is any amino acid
  Variant (357)..(372): Xaa in position 357 to 372 is any or no amino acid
  Variant (374)..(374): Xaa in position 374 is any amino acid
  Variant (382)..(382): Xaa in position 382 is any amino acid
  Variant (385)..(387): Xaa in position 385 to 387 is any amino acid
  Variant (389)..(391): Xaa in position 389 to 391 is any amino acid
  Variant (392)..(405): Xaa in position 392 to 405 is any or no amino acid
  Variant (411)..(411): Xaa in position 411 is any amino acid
  Variant (416)..(416): Xaa in position 416 is any amino acid
  Variant (418)..(420): Xaa in position 418 to 420 is any amino acid
  Variant (421)..(427): Xaa in position 421 to 427 is any or no amino acid
  Variant (436)..(439): Xaa in position 436 to 439 is any amino acid
  Variant (440)..(443): Xaa in position 440 to 443 is any or no amino acid
  Variant (445)..(453): Xaa in position 445 to 453 is any amino acid
  Variant (454)..(467): Xaa in position 454 to 467 is any or no amino acid
  Variant (469)..(475): Xaa in position 469 to 475 is any amino acid
  Variant (476)..(486): Xaa in position 476 to 486 is any or no amino acid
  Variant (488)..(488): Xaa in position 488 is any amino acid
  Variant (489)..(489): Xaa in position 489 is any or no amino acid
  Variant (492)..(492): Xaa in position 492 is any amino acid
  Variant (494)..(496): Xaa in position 494 to 496 is any amino acid
  Variant (498)..(508): Xaa in position 498 to 508 is any amino acid
  Variant (510)..(515): Xaa in position 510 to 515 is any amino acid
  Variant (516)..(517): Xaa in position 516 to 517 is any or no amino acid
  Variant (519)..(525): Xaa in position 519 to 525 is any amino acid
  Variant (526)..(526): Xaa in position 526 is any or no amino acid
YVIXGGGXXAGYAAXXFXXXXXXXXXXXGXLXIXSXEXXXPYERPALXKXYLXPXXXXXARLPXFHXCVGXGXEXXXXXWYXEXGIEXXXXXXXXXXDXXXXTLXXXXGXXXXYXXXLXXATGXXXXXLXXXXXXGXXXXXXXXYXRXXXDADXLXXXXXXXXXXXXXXVXXGGGYIGXEXXAXXXXXXXXXXXTXXXPEXXXMXRLFTXXXAXXYEXXYXXXGXXXXKGXXXXXXXXXXXXXXXXXGXVXXVXLXXGXXXXADXVXXXXXXXXXXXXXXXXXXXXXXXXXXXXXXVGXGXXPXXXXFXXXXXXXXXXXXGGIXXDXXFXXXXXXXXXXXXXAXGDVAXFPXKXXXXXXXXXXXXXXXXXXXRXEHVDHARXSAXXXVXXXXXXXXXXXXXXXXXYDYLPXFYSRXFXXXXXXXXXXWQFYGDNVXXXXXXXXGXXXXXXXXXXXXXXXXXXXXXXXWXXXXXXXXXXXXXXXXXXGXXLEXGXXXEXXXXXXXXXXXPXXXXXXXXLXXXXXXXXA

SEQ ID NO: 8900 - protein, 28 aa, Artificial sequence
  protein pattern
  Variant (3)..(3): Xaa in position 3 is any amino acid
  Variant (5)..(5): Xaa in position 5 is Gly or Ser
  Variant (8)..(8): Xaa in position 8 is Cys, Thr or Val
  Variant (12)..(12): Xaa in position 12 is any amino acid
  Variant (13)..(13): Xaa in position 13 is Gly or Asn
  Variant (14)..(14): Xaa in position 14 is Asp, Glu or Gly
  Variant (15)..(15): Xaa in position 15 is Glu or Gln
  Variant (16)..(18): Xaa in position 16 to 18 is any amino acid
  Variant (19)..(19): Xaa in position 19 is Ala or Pro
  Variant (20)..(21): Xaa in position 20 to 21 is any amino acid
  Variant (23)..(23): Xaa in position 23 is any amino acid
  Variant (24)..(24): Xaa in position 24 is Asp, Glu or Gln
  Variant (25)..(25): Xaa in position 25 is any amino acid
  Variant (26)..(26): Xaa in position 26 is Gly or Val
  Variant (28)..(28): Xaa in position 28 is Ala, Asp, Glu, Gln, Ser or Thr
ARXPXFHXCVGXXXXXXXXXXYXXXXIX

SEQ ID NO: 8901 - protein, 26 aa, Artificial sequence
  protein pattern
  Variant (5)..(5): Xaa in position 5 is Ala, Pro or Ser
  Variant (6)..(6): Xaa in position 6 is any amino acid
  Variant (7)..(7): Xaa in position 7 is Ile or Leu
  Variant (9)..(10): Xaa in position 9 to 10 is any amino acid
  Variant (13)..(18): Xaa in position 13 to 18 is any or no amino acid
  Variant (20)..(20): Xaa in position 20 is Ile or Val
  Variant (21)..(21): Xaa in position 21 is any amino acid
  Variant (22)..(22): Xaa in position 22 is Phe or Ile
  Variant (23)..(23): Xaa in position 23 is Ile, Leu or Val
  Variant (26)..(26): Xaa in position 26 is Ala or Thr
RLFTXXXAXXYEXXXXXXGXXXXKGX

SEQ ID NO: 8902 - protein, 17 aa, Artificial sequence
  protein pattern
  Variant (2)..(2): Xaa in position 2 is Asn or Ser
  Variant (3)..(3): Xaa in position 3 is any amino acid
  Variant (4)..(4): Xaa in position 4 is Ala, Gly, Pro, Ser or Thr
  Variant (5)..(5): Xaa in position 5 is any amino acid
  Variant (6)..(6): Xaa in position 6 is Ile or Val
  Variant (7)..(7): Xaa in position 7 is Phe or Tyr
  Variant (8)..(8): Xaa in position 8 is Ala or Thr
  Variant (9)..(9): Xaa in position 9 is Ile, Leu or Val
  Variant (10)..(10): Xaa in position 10 is Ala or Gly
  Variant (12)..(12): Xaa in position 12 is Ile or Val
  Variant (14)..(14): Xaa in position 14 is Ala, Ser or Thr
  Variant (17)..(17): Xaa in position 17 is Ile, Leu, Met or Val
TXXXXXXXXXDXAXFPX

SEQ ID NO: 8903 - protein, 25 aa, Artificial sequence
  protein pattern
  Variant (2)..(2): Xaa in position 2 is any amino acid
  Variant (3)..(3): Xaa in position 3 is any or no amino acid
  Variant (5)..(6): Xaa in position 5 to 6 is any amino acid
  Variant (7)..(7): Xaa in position 7 is any or no amino acid
  Variant (9)..(10): Xaa in position 9 to 10 is any amino acid
  Variant (11)..(11): Xaa in position 11 is Ala or Pro
  Variant (19)..(19): Xaa in position 19 is Ser or Thr
  Variant (21)..(21): Xaa in position 21 is Ala or Gly
  Variant (23)..(23): Xaa in position 23 is Ile or Leu
  Variant (24)..(24): Xaa in position 24 is any amino acid
  Variant (25)..(25): Xaa in position 25 is Leu or Pro
LXXIXXXEXXXPYERPALXKXYXXX

SEQ ID NO: 8904 - protein, 18 aa, Artificial sequence
  protein pattern
  Variant (2)..(3): Xaa in position 2 to 3 is Ile or Val
  Variant (10)..(10): Xaa in position 10 is Leu or Met
  Variant (12)..(12): Xaa in position 12 is any amino acid
  Variant (13)..(13): Xaa in position 13 is any or no amino acid
  Variant (15)..(15): Xaa in position 15 is Ala or Val
  Variant (16)..(17): Xaa in position 16 to 17 is any amino acid
  Variant (18)..(18): Xaa in position 18 is Ala, Gly, Ile, Leu or Val
VXXGGGYIGXEXXAXXXX

SEQ ID NO: 8905 - protein, 18 aa, Artificial sequence
  protein pattern
  Variant (4)..(4): Xaa in position 4 is Phe or Tyr
  Variant (8)..(10): Xaa in position 8 to 10 is any or no amino acid
  Variant (12)..(12): Xaa in position 12 is Gly or Val
  Variant (13)..(13): Xaa in position 13 is Asp, Glu, His or Lys
  Variant (14)..(14): Xaa in position 14 is any amino acid
  Variant (15)..(15): Xaa in position 15 is Gly, Ile or Val
  Variant (16)..(17): Xaa in position 16 to 17 is any amino acid
  Variant (18)..(18): Xaa in position 18 is Gly, Ser or Thr
WQFXGDNXXXVXXXXXXX

SEQ ID NO: 8906 - protein, 30 aa, Artificial sequence
  protein pattern
  Variant (2)..(4): Xaa in position 2 to 4 is any amino acid
  Variant (5)..(6): Xaa in position 5 to 6 is any or no amino acid
  Variant (8)..(9): Xaa in position 8 to 9 is any or no amino acid
  Variant (11)..(11): Xaa in position 11 is Leu or Val
  Variant (16)..(16): Xaa in position 16 is any amino acid
  Variant (17)..(17): Xaa in position 17 is Ala or Ser
  Variant (19)..(19): Xaa in position 19 is Lys or Arg
  Variant (22)..(23): Xaa in position 22 to 23 is any amino acid
  Variant (24)..(24): Xaa in position 24 is Ala, Cys or Val
  Variant (25)..(25): Xaa in position 25 is Ala, Ile or Val
  Variant (26)..(26): Xaa in position 26 is any amino acid
  Variant (27)..(27): Xaa in position 27 is Ala, Ser, Thr or Val
  Variant (28)..(28): Xaa in position 28 is Ile or Leu
  Variant (29)..(29): Xaa in position 29 is any amino acid
  Variant (30)..(30): Xaa in position 30 is Ala, Asp, Glu, Gly, Ser or Thr
KXXXXXRXXRXEHVDXXRXSAXXXXXXXXX

SEQ ID NO: 8907 - protein, 14 aa, Artificial sequence
  protein pattern
  Variant (5)..(5): Xaa in position 5 is Phe or Tyr
  Variant (10)..(10): Xaa in position 10 is Ala, Ser or Val
  Variant (12)..(12): Xaa in position 12 is Ala, Asp, Glu, Asn, Ser or Thr
  Variant (13)..(13): Xaa in position 13 is any amino acid
  Variant (14)..(14): Xaa in position 14 is Ala, Glu, Gly or Ser
DYLPXFYSRXFXXX

SEQ ID NO: 8908 - protein, 19 aa, Artificial sequence
  protein pattern
  Variant (2)..(2): Xaa in position 2 is Ala, Gly or Ser
  Variant (3)..(6): Xaa in position 3 to 6 is any amino acid
  Variant (7)..(7): Xaa in position 7 is Ile or Val
  Variant (8)..(8): Xaa in position 8 is any amino acid
  Variant (10)..(10): Xaa in position 10 is Ile, Leu or Val
  Variant (12)..(14): Xaa in position 12 to 14 is any amino acid
  Variant (18)..(18): Xaa in position 18 is any amino acid
  Variant (19)..(19): Xaa in position 19 is Ile, Leu or Val
GXXXXXXXYXRXXXDADXX

SEQ ID NO: 8909 - protein, 21 aa, Artificial sequence
  protein pattern
  Variant (2)..(2): Xaa in position 2 is any or no amino acid
  Variant (4)..(4): Xaa in position 4 is any amino acid
  Variant (5)..(5): Xaa in position 5 is Asp or Asn
  Variant (7)..(8): Xaa in position 7 to 8 is any amino acid
  Variant (9)..(9): Xaa in position 9 is Ile, Leu or Val
  Variant (10)..(10): Xaa in position 10 is any amino acid
  Variant (11)..(11): Xaa in position 11 is Ala, Ser, Thr or Val
  Variant (13)..(13): Xaa in position 13 is any amino acid
  Variant (15)..(15): Xaa in position 15 is Gly, Ile or Val
  Variant (16)..(16): Xaa in position 16 is Ile or Val
  Variant (18)..(18): Xaa in position 18 is Ile or Val
  Variant (20)..(20): Xaa in position 20 is Ala, Gly or Ile
  Variant (21)..(21): Xaa in position 21 is Lys or Arg
VXLXXGXXXXXDXVXXGXGXX

SEQ ID NO: 8910 - protein, 27 aa, Artificial sequence
  protein pattern
  Variant (2)..(2): Xaa in position 2 is Ala, Ser or Val
  Variant (3)..(3): Xaa in position 3 is Phe, Leu or Met
  Variant (4)..(4): Xaa in position 4 is Leu, Met or Val
  Variant (6)..(6): Xaa in position 6 is any or no amino acid
  Variant (8)..(10): Xaa in position 8 to 10 is any amino acid
  Variant (11)..(11): Xaa in position 11 is any or no amino acid
  Variant (13)..(19): Xaa in position 13 to 19 is any amino acid
  Variant (21)..(23): Xaa in position 21 to 23 is any amino acid
  Variant (24)..(24): Xaa in position 24 is any or no amino acid
  Variant (26)..(26): Xaa in position 26 is any amino acid
  Variant (27)..(27): Xaa in position 27 is Ala, Ile or Val
GXXXEXGXXXXEXXXXXXXAXXXXPXX

SEQ ID NO: 8911 - protein, 14 aa, Artificial sequence
  protein pattern
  Variant (2)..(3): Xaa in position 2 to 3 is any amino acid
  Variant (4)..(4): Xaa in position 4 is any or no amino acid
  Variant (7)..(7): Xaa in position 7 is Ala, Cys or Ser
  Variant (8)..(8): Xaa in position 8 is any amino acid
  Variant (9)..(9): Xaa in position 9 is Ala or Val
  Variant (10)..(10): Xaa in position 10 is any amino acid
  Variant (11)..(11): Xaa in position 11 is Lys or Arg
  Variant (12)..(12): Xaa in position 12 is Phe or Leu
  Variant (13)..(13): Xaa in position 13 is Glu, Pro, Ser or Thr
  Variant (14)..(14): Xaa in position 14 is Asp or Glu
LXXXTGXXXXXXXX

SEQ ID NO: 8912 - DNA, 1482 bp, Arabidopsis thaliana
  CDS (1)..(1482)
atgtctgcagttcgtagagtcatggcgttagcatcaaccacgttgccgacgaagtccggattatctctttggtgtccgtcttctccgtctctcgctcgccgatttcccgctcgtttttctccgatcggttctagaatcgcttccagaagcctcgtcactgcttcgttcgctaacgagaatcgcgagtttgtgattgttggtggaggaaatgctgctggttatgctgctagaacttttgtggaaaatggaatggctgatggtcggctatgcattgtgaccaaagaggcttacgcaccttatgagagaccggctttgacaaaagcttacttgttcccaccagagaagaagccagctcgtttaccaggatttcatacttgcgttggaggtggtggagaaaggcaaacaccagattggtataaggagaaaggaattgaggtaatatatgaagatccagtggctggagctgattttgaaaagcaaacactcaccacagacgcagggaagcagttaaaatatggatctctaattatcgctacagggtgtacagcctcaaggttcccagataaaatcggtgggcacttgccaggggttcactatattcgggaggttgcagatgctgattcactgatagcatctctgggaaaggcaaagaaaattgtcattgttggtggtggctacatcggcatggaggttgctgctgcagctgttgcgtggaatctagatacaacgattgtattccctgaagatcagcttttgcaaagattgttcactccatcgcttgctcagaaatatgaagaactgtaccgtcaaaatggtgttaagtttgtcaagggcgcttccataaataacttggaagcaggttcggatgggcgtgtatcagctgttaagcttgctgatgggtctacaattgaggcagacacggttgtaattggaattggagctaagcctgctattggcccctttgaaactttggccatgaacaaatcaattggaggaattcaggtcgatggcttgttcaggacaagtacccctggaatttttgctattggagatgtcgcagccttccctttgaagatatatgataggatgactcgagttgaacatgttgatcacgcccgccgctctgcacaacactgtgtgaaatcactactcacggcacacactgacacgtacgattatcttccatatttctactcaagagtattcgagtatgaaggaagcccaagaaaagtgtggtggcagtttttcggagataatgtgggagaaacagtggaggttgggaactttgacccgaaaatcgctaccttctggattgaatctggcaggttgaaaggtgttctagtagaaagcggatcgcctgaggagttccagcttctaccaaagctagcaagaagccaaccacttgtcgataaggctaaactcgcaagcgcatcttcagtcgaagaagctctcgagattgctcaagccgctctacagagttag

SEQ ID NO: 8913 - protein, 493 aa, Arabidopsis thaliana
MSAVRRVMALASTTLPTKSGLSLWCPSSPSLARRFPARFSPIGSRIASRSLVTASFANENREFVIVGGGNAAGYAARTFVENGMADGRLCIVTKEAYAPYERPALTKAYLFPPEKKPARLPGFHTCVGGGGERQTPDWYKEKGIEVIYEDPVAGADFEKQTLTTDAGKQLKYGSLIIATGCTASRFPDKIGGHLPGVHYIREVADADSLIASLGKAKKIVIVGGGYIGMEVAAAAVAWNLDTTIVFPEDQLLQRLFTPSLAQKYEELYRQNGVKFVKGASINNLEAGSDGRVSAVKLADGSTIEADTVVIGIGAKPAIGPFETLAMNKSIGGIQVDGLFRTSTPGIFAIGDVAAFPLKIYDRMTRVEHVDHARRSAQHCVKSLLTAHTDTYDYLPYFYSRVFEYEGSPRKVWWQFFGDNVGETVEVGNFDPKIATFWIESGRLKGVLVESGSPEEFQLLPKLARSQPLVDKAKLASASSVEEALEIAQAALQS

SEQ ID NO: 8914 - DNA, 1440 bp, Oryza sativa; identical to SEQ ID NO: 8723
  CDS (1)..(1440)

SEQ ID NO: 8915 - protein, 479 aa, Oryza sativa; identical to SEQ ID NO: 8724

SEQ ID NO: 8916 - DNA, 1431 bp, Oryza sativa; identical to SEQ ID NO: 8725
  CDS (1)..(1431)

SEQ ID NO: 8917 - protein, 476 aa, Oryza sativa; identical to SEQ ID NO: 8726

SEQ ID NO: 8918 - DNA, 1521 bp, Oryza sativa; identical to SEQ ID NO: 8727
  CDS (1)..(1521)

SEQ ID NO: 8919 - protein, 506 aa, Oryza sativa; identical to SEQ ID NO: 8728

SEQ ID NO: 8920 - DNA, 1509 bp, Oryza sativa; identical to SEQ ID NO: 8729
  CDS (1)..(1509)

SEQ ID NO: 8921 - protein, 502 aa, Oryza sativa; identical to SEQ ID NO: 8730

SEQ ID NO: 8922 - DNA, 1476 bp, Oryza sativa; identical to SEQ ID NO: 8731
  CDS (1)..(1476)

SEQ ID NO: 8923 - protein, 491 aa, Oryza sativa; identical to SEQ ID NO: 8732

SEQ ID NO: 8924 - DNA, 1308 bp, Oryza sativa; identical to SEQ ID NO: 8733
  CDS (1)..(1308)

SEQ ID NO: 8925 - protein, 435 aa, Oryza sativa; identical to SEQ ID NO: 8734

SEQ ID NO: 8926 - DNA, 1437 bp, Glycine max
  CDS (1)..(1437)
atggggagagcctttgtgtatgtgattcttggaggaggcgtggctgctggctatgctgctcttgaattcgtcaagaaaggagtctctcatggtgaactgtgtattatttccgatgaaccagtggctccttatgaaaggcccgcattgagcaaaggatttttgcttccagaagctgctgcccggcttccatcctttcatacctgtgttggtgcaaatgaggagaggctaacttcaaaatggtataaagagcatgggattgaattagttcttggaactggagttaaatctgctgatgtaaaacgtaagacactattaacaacaaccggagagaccataagttacaagattcttattgttgctaccggtgctcgggctttgaagctggaagaatttggggtcactggatcagatgcaggaaatgtctgttatttaagagatatagcagatgcaaataggcttgttgatgttatgcaatcttgtcctggaggtaatgctgttgtcattggtggtggatacataggcatggagtgtgcagcgtctttagtgatcaataaaataaatgtaacaatggtctttcctgaggaacattgcatgggtcgattatttacctcaaagatagcaaactactatgaagaatattataaatcaagaggagtaaacttcattaagggaactgtgctgtcatcatttgattttgattccaatgggaaggttacagctgttaatcttagagatggaagcacactgtctgtggacatggttgtggtaggaattggaatacgtccaaatacagggctgtttgaaggccagcttactttggagaaaggtggaatcaaagtaaatgggatgttgcagtcaagcaacagctcagtctatgccattggagatgttgcagcatttccagtcaaagcagttggggaaacacgaagacttgagcatgttgattcagcacggaaatctgcgagacatgttgtttctgccataatggaaccaaacaaaacgagagaattcgattaccttccttttttctattccagaatcttcacactgtcttggcaattttatggtgataatgttggggaagttgtctattatggagatatgtcaggtagtacatttggagcatactgggtaagcaaggatcaccttgttggggctttccttgaaggcggaactaaagaagagtatgaagccatagccaaggccactaggttaaggccggtaattgaagacttgactgaacttgagagacagggtttgaggtttgctgttacagttagcgagaaaccgatggcctcacccccaattgaggttagggcctcagacctacttttggaaaaaccattatatgcttggcatgctacagctggggttattattgctgcatcaatagctggatttgcatatttttatgggaaaaagcgccacagatggtga

SEQ ID NO: 8927 - protein, 478 aa, Glycine max
MGRAFVYVILGGGVAAGYAALEFVKKGVSHGELCIISDEPVAPYERPALSKGFLLPEAAARLPSFHTCVGANEERLTSKWYKEHGIELVLGTGVKSADVKRKTLLTTTGETISYKILIVATGARALKLEEFGVTGSDAGNVCYLRDIADANRLVDVMQSCPGGNAVVIGGGYIGMECAASLVINKINVTMVFPEEHCMGRLFTSKIANYYEEYYKSRGVNFIKGTVLSSFDFDSNGKVTAVNLRDGSTLSVDMVVVGIGIRPNTGLFEGQLTLEKGGIKVNGMLQSSNSSVYAIGDVAAFPVKAVGETRRLEHVDSARKSARHVVSAIMEPNKTREFDYLPFFYSRIFTLSWQFYGDNVGEVVYYGDMSGSTFGAYWVSKDHLVGAFLEGGTKEEYEAIAKATRLRPVIEDLTELERQGLRFAVTVSEKPMASPPIEVRASDLLLEKPLYAWHATAGVIIAASIAGFAYFYGKKRHRW

SEQ ID NO: 8928 - DNA, 1365 bp, Glycine max; identical to SEQ ID NO: 8735
  CDS (1)..(1365)

SEQ ID NO: 8929 - protein, 454 aa, Glycine max; identical to SEQ ID NO: 8736

SEQ ID NO: 8930 - DNA, 1302 bp, Glycine max; identical to SEQ ID NO: 8873
  CDS (1)..(1302)

SEQ ID NO: 8931 - protein, 433 aa, Glycine max; identical to SEQ ID NO: 8874

SEQ ID NO: 8932 - DNA, 1302 bp, Glycine max
  CDS (1)..(1302)
atggccaaaaccttcaaatacatcatcctcggaggaggagtttccgctggttatgcggcgagggagtttgccaaacagggcgttaagccaggggagttggctatcatttccaaagaagcggtagcaccttatgaacgtcctgctctgagcaaggcttacctttttccagagtcccctgctagacttcctgggttccatgtctgtgttggaagtggaggggaaaggttgcttcctgagtggtacacagagaaagggatagagttaatacttagcacagaaatagtaaaggtggaccttgcggcaaaatctctgatcagtgcgggaggagaaacattcagttatcagattttgattgttgcaactggctcaacagttataaggctgacagattttggtgtagaaggagctgatgcgaaaaacatcttttatttgagggaggttgatgatgctgacaaattgtatgaggcaatcaaggcaaagaagaatgggaaagctgtggttgttgggggaggatacattggtctggagcttagtgcagtgttgaaactcaacaatattgatgttaccatggtctacccggagccttggtgtatgccacgactttttacggctggtatagctgaattctatgaggagtattacaaaaataagggtgtcaatatcattaaaggaactgttgctgttggattcacttctaattctgatggagaggtaaaagaagtcaaactaaaggatggcagggtcctggaagctgatattgttgtcgttggtgttggaggaaggcctcaaacagccttagtcaaagggcaggttgaagaggagaagggtggaatcaagaccgatgctttcttcaaaactaatctttccgatgtatatgctgttggtgatgttgctactttccctttgaaattatacggtgaattgagaagagttgaacatgttgatcattctcgcaaatcagctgaacaggctgtgaaggccatcaaggcagctgaggaaggaagaacagttgaggagtatgattaccttccatacttctattcccgttcatttgatctgtcttggcaattctatggcgacaatgtcggcgacacagtactattcggagacaacaatcctgcgtcgtcaaagcctaagtttgggacatactggattaaagatgggaaagttgttggggtctttctggaaggtggaactcctgaagagaaccaggctattgctaaagttgctaaggtccagcctccggttgcagatgtagatcaacttgctaaggaaggcctttcctttgctagtaaaatataa

SEQ ID NO: 8933 - protein, 433 aa, Glycine max
MAKTFKYIILGGGVSAGYAAREFAKQGVKPGELAIISKEAVAPYERPALSKAYLFPESPARLPGFHVCVGSGGERLLPEWYTEKGIELILSTEIVKVDLAAKSLISAGGETFSYQILIVATGSTVIRLTDFGVEGADAKNIFYLREVDDADKLYEAIKAKKNGKAVVVGGGYIGLELSAVLKLNNIDVTMVYPEPWCMPRLFTAGIAEFYEEYYKNKGVNIIKGTVAVGFTSNSDGEVKEVKLKDGRVLEADIVVVGVGGRPQTALVKGQVEEEKGGIKTDAFFKTNLSDVYAVGDVATFPLKLYGELRRVEHVDHSRKSAEQAVKAIKAAEEGRTVEEYDYLPYFYSRSFDLSWQFYGDNVGDTVLFGDNNPASSKPKFGTYWIKDGKVVGVFLEGGTPEENQAIAKVAKVQPPVADVDQLAKEGLSFASKI

SEQ ID NO: 8934 - DNA, 1809 bp, Glycine max; identical to SEQ ID NO: 8737
  CDS (105)..(1541)

SEQ ID NO: 8935 - protein, 478 aa, Glycine max; identical to SEQ ID NO: 8738

SEQ ID NO: 8936 - DNA, 1927 bp, Glycine max; identical to SEQ ID NO: 8739
  CDS (98)..(1534)

SEQ ID NO: 8937 - protein, 478 aa, Glycine max; identical to SEQ ID NO: 8740

SEQ ID NO: 8938 - DNA, 1308 bp, Oryza sativa Japonica Group; identical to SEQ ID NO: 8741
  CDS (1)..(1308)

SEQ ID NO: 8939 - protein, 435 aa, Oryza sativa Japonica Group; identical to SEQ ID NO: 8742

SEQ ID NO: 8940 - DNA, 1500 bp, Zea mays; identical to SEQ ID NO: 8743
  CDS (1)..(1500)

SEQ ID NO: 8941 - protein, 499 aa, Zea mays; identical to SEQ ID NO: 8744

SEQ ID NO: 8942 - DNA, 1437 bp, Zea mays; identical to SEQ ID NO: 8745
  CDS (1)..(1437)

SEQ ID NO: 8943 - protein, 478 aa, Zea mays; identical to SEQ ID NO: 8746

SEQ ID NO: 8944 - DNA, 1467 bp, Arabidopsis thaliana; identical to SEQ ID NO: 8747
  CDS (1)..(1467)

SEQ ID NO: 8945 - protein, 488 aa, Arabidopsis thaliana; identical to SEQ ID NO: 8748

SEQ ID NO: 8946 - DNA, 1305 bp, Arabidopsis thaliana; identical to SEQ ID NO: 8749
  CDS (1)..(1305)

SEQ ID NO: 8947 - protein, 434 aa, Arabidopsis thaliana; identical to SEQ ID NO: 8750

SEQ ID NO: 8948 - DNA, 1461 bp, Arabidopsis thaliana; identical to SEQ ID NO: 8721
  CDS (1)..(1461)

SEQ ID NO: 8949 - protein, 486 aa, Arabidopsis thaliana; identical to SEQ ID NO: 8722

SEQ ID NO: 8950 - DNA, 1326 bp, Arabidopsis thaliana; identical to SEQ ID NO: 8751
  CDS (1)..(1326)

SEQ ID NO: 8951 - protein, 441 aa, Arabidopsis thaliana; identical to SEQ ID NO: 8752

SEQ ID NO: 8952 - DNA, 1308 bp, Arabidopsis thaliana; identical to SEQ ID NO: 8753
  CDS (1)..(1308)

SEQ ID NO: 8953 - protein, 435 aa, Arabidopsis thaliana; identical to SEQ ID NO: 8754

SEQ ID NO: 8954 - DNA, 1266 bp, Streptomyces coelicolor A3(2)
  CDS (1)..(1266): transl_table=11
atggtcgacgcggatcagacattcgtcatcgtcggaggcggcctggcgggcgcgaaagcggccgagacgctccgcacggagggcttcaccggccgggtgatcctcgtctgcgacgaacgcgaccacccctacgagcgcccgccgctgtccaagggctacctcctgggcaaggaggagcgcgacagcgtcttcgtgcacgagcccgcctggtacgcccggcacgacatcgagctgcacctcggccagaccgtcgtcgcgatcgaccgcgccgccaagaccgtccactacggcgacgacggcacccacgtcagctacgacaagctgctcatcgcgaccggcgccgagccccgccgcctggacgtccccggcaccggcctcgcgggcgtccaccacctgcgccgcctggcgcacgccgagcgcctcaagggcgtcctcgccaccctcggccgggacaacggacacctggtgatcgccggcgcgggctggatcggcctggaggtcgcggccgcggcccgcgagtacggtgcggaggtcaccgtcatcgagcccgccccgaccccgctgcacggcgtcctcggtcccgagctgggcgccgtcttcgccgagctgcacgagtcgcgcggcgtccgcttccgcttcggcgtgaagctgaccgagatcgtcggccaggacggtgtggtgctggccgcccgcaccgacgacggcgaggagcaccccgcgcacgacgtgctcgccgcgatcggcgccgccccgcgcaccgcgctcgcccaggcggccgggttggagatcgccgaccgcgcgcacggcggcggcatcgtcgtcgacgaccacctgcgcacctccgaccccgacatcttcgcggccggcgacgtggcctccttccaccacgccctcttcgacaccagcctgcgcgtggagcactgggccaacgccctgaacggcggtccggccgccgcccgcgcgatgctcggcaggggcctcgcccacgaccgcgtgccctacttcttcaccgaccagtacgacctgggcatggagtactccggctgggcgccggccggctcgtacgaccaggtggtgatccgcggggacgcggcgaagcgcgagttcatcgccttctgggtgaaggagggccgggtgctggccgggatgaacgtcaacgtgtgggacgtcacggagccgatccagcagctgatccgctcgaagacccgggtggacacggaggacctggcgaacccgcacgtatccctcgaaagcctcgtcgcatag

SEQ ID NO: 8955 - protein, 421 aa, Streptomyces coelicolor A3(2)
MVDADQTFVIVGGGLAGAKAAETLRTEGFTGRVILVCDERDHPYERPPLSKGYLLGKEERDSVFVHEPAWYARHDIELHLGQTVVAIDRAAKTVHYGDDGTHVSYDKLLIATGAEPRRLDVPGTGLAGVHHLRRLAHAERLKGVLATLGRDNGHLVIAGAGWIGLEVAAAAREYGAEVTVIEPAPTPLHGVLGPELGAVFAELHESRGVRFRFGVKLTEIVGQDGVVLAARTDDGEEHPAHDVLAAIGAAPRTALAQAAGLEIADRAHGGGIVVDDHLRTSDPDIFAAGDVASFHHALFDTSLRVEHWANALNGGPAAARAMLGRGLAHDRVPYFFTDQYDLGMEYSGWAPAGSYDQVVIRGDAAKREFIAFWVKEGRVLAGMNVNVWDVTEPIQQLIRSKTRVDTEDLANPHVSLESLVA

SEQ ID NO: 8956 - DNA, 1371 bp, Ostreococcus lucimarinus CCE9901; identical to SEQ ID NO: 8757
  CDS (1)..(1371)

SEQ ID NO: 8957 - protein, 456 aa, Ostreococcus lucimarinus CCE9901; identical to SEQ ID NO: 8758

SEQ ID NO: 8958 - DNA, 1308 bp, Chlamydomonas reinhardtii; identical to SEQ ID NO: 8759
  CDS (1)..(1308)

SEQ ID NO: 8959 - protein, 435 aa, Chlamydomonas reinhardtii; identical to SEQ ID NO: 8760

SEQ ID NO: 8960 - DNA, 1305 bp, Physcomitrella patens subsp. patens; identical to SEQ ID NO: 8761
  CDS (1)..(1305)

SEQ ID NO: 8961 - protein, 434 aa, Physcomitrella patens subsp. patens; identical to SEQ ID NO: 8762

SEQ ID NO: 8962 - DNA, 1302 bp, Physcomitrella patens subsp. patens; identical to SEQ ID NO: 8763
  CDS (1)..(1302)

SEQ ID NO: 8963 - protein, 433 aa, Physcomitrella patens subsp. patens; identical to SEQ ID NO: 8764

SEQ ID NO: 8964 - DNA, 1305 bp, Physcomitrella patens subsp. patens; identical to SEQ ID NO: 8765
  CDS (1)..(1305)

SEQ ID NO: 8965 - protein, 434 aa, Physcomitrella patens subsp. patens; identical to SEQ ID NO: 8766

SEQ ID NO: 8966 - DNA, 1461 bp, Physcomitrella patens subsp. patens; identical to SEQ ID NO: 8767
  CDS (1)..(1461)

SEQ ID NO: 8967 - protein, 486 aa, Physcomitrella patens subsp. patens; identical to SEQ ID NO: 8768

SEQ ID NO: 8968 - DNA, 1437 bp, Vitis vinifera; identical to SEQ ID NO: 8769
  CDS (1)..(1437)

SEQ ID NO: 8969 - protein, 478 aa, Vitis vinifera; identical to SEQ ID NO: 8770

SEQ ID NO: 8970 - DNA, 1473 bp, Vitis vinifera; identical to SEQ ID NO: 8771
  CDS (1)..(1473)

SEQ ID NO: 8971 - protein, 490 aa, Vitis vinifera; identical to SEQ ID NO: 8772

SEQ ID NO: 8972 - DNA, 1305 bp, Vitis vinifera; identical to SEQ ID NO: 8773
  CDS (1)..(1305)

SEQ ID NO: 8973 - protein, 434 aa, Vitis vinifera; identical to SEQ ID NO: 8774

SEQ ID NO: 8974 - DNA, 1437 bp, Populus trichocarpa; identical to SEQ ID NO: 8775
  CDS (1)..(1437)

SEQ ID NO: 8975 - protein, 478 aa, Populus trichocarpa; identical to SEQ ID NO: 8776

SEQ ID NO: 8976 - DNA, 1494 bp, Populus trichocarpa; identical to SEQ ID NO: 8777
  CDS (1)..(1494)

SEQ ID NO: 8977 - protein, 497 aa, Populus trichocarpa; identical to SEQ ID NO: 8778

SEQ ID NO: 8978 - DNA, 1305 bp, Populus trichocarpa; identical to SEQ ID NO: 8779
  CDS (1)..(1305)

SEQ ID NO: 8979 - protein, 434 aa, Populus trichocarpa; identical to SEQ ID NO: 8780

SEQ ID NO: 8980 - DNA, 1230 bp, Phenylobacterium zucineum HLK1
  CDS (1)..(1230): transl_table=11
atgagcgacgctacggcgcatgtggtgatcctgggcgcgggccatgccggcggcacggccgccgcgctgctgcgccagtacggccacgagggccccatcaccctggtgggcgaggagccgatcccgccctaccagcgcccgccgctctccaaggcctggctgaagggcgaggccgacgccgactccctggccctcaagcccctggagttctacgccgagcacggaatcgacttccgcccgggcgtgaaggcggtgcagctcaagcgcagcgaccgcaccgtcgtcctctccgacggctcgaccctcgcctacgacgtcctgatcatcgccaccggcgcccggcccatcgccctgccgatccccggcgccgacctggccggcgtcatgttcctgcgcaccgccgccgacgccgaacagctcaaggccgccgtcggaccgggcaagcgcctggccgtggtgggcggcggctacatcgggctggaggtcgccgcctcgggcagggccctgggcgccgaggtcaccgtgctggagcgcgagccgcgcctgctggcccgggtcgcctgccccgagctctccaccttcttccgcgaataccacgagaagcacggcgtcacgttcgagctgggctgcagcgtcaccggcttcgagggcgaggccggccgcgtcaccggcgtcaccctggccgacggccgcacgatcgcctgcgacgccgcggtggtcggcgtgggcgcggcccccaacgacgagatcgccgccgacgcgggcctcgagaccgcccgcggcgtggtggtcgacctcgacgcgcggacctcggacccggccgtcttcgccatcggcgacgtcgcccaccggccgatgccgatctacgaccggatgttccggatggagagcgtgcccaacgccctggagcaggccaagcaggccgccgccgccatcaccggccgcccccgcccgccgggcgagtgcccctggcagtggtcggaccagtacgacctgaagctgcagatcgccggctaccccttcgacgccgaccagatcgtggtgcggggcgacccggccacggcgaagttcgccgtcttccacctgaaggggagccaggtgcaggccgtcgaggcgatcaacgccccgcccgaattcatgatgggcaagcagctcatcgcgaaccgcaagccggtggaccccgcaaggcttgccgaccccacgatttccatgaaagaggtcgccgcttaa

SEQ ID NO: 8981 - protein, 409 aa, Phenylobacterium zucineum HLK1
MSDATAHVVILGAGHAGGTAAALLRQYGHEGPITLVGEEPIPPYQRPPLSKAWLKGEADADSLALKPLEFYAEHGIDFRPGVKAVQLKRSDRTVVLSDGSTLAYDVLIIATGARPIALPIPGADLAGVMFLRTAADAEQLKAAVGPGKRLAVVGGGYIGLEVAASGRALGAEVTVLEREPRLLARVACPELSTFFREYHEKHGVTFELGCSVTGFEGEAGRVTGVTLADGRTIACDAAVVGVGAAPNDEIAADAGLETARGVVVDLDARTSDPAVFAIGDVAHRPMPIYDRMFRMESVPNALEQAKQAAAAITGRPRPPGECPWQWSDQYDLKLQIAGYPFDADQIVVRGDPATAKFAVFHLKGSQVQAVEAINAPPEFMMGKQLIANRKPVDPARLADPTISMKEVAA

SEQ ID NO: 8982 - DNA, 1305 bp, Acanthus ebracteatus; identical to SEQ ID NO: 8781
  CDS (1)..(1305)

SEQ ID NO: 8983 - protein, 434 aa, Acanthus ebracteatus; identical to SEQ ID NO: 8782

SEQ ID NO: 8984 - DNA, 1440 bp, Oryza sativa subsp. indica; identical to SEQ ID NO: 8783
  CDS (1)..(1440)

SEQ ID NO: 8985 - protein, 479 aa, Oryza sativa subsp. indica; identical to SEQ ID NO: 8784

SEQ ID NO: 8986 - DNA, 1308 bp, Oryza sativa subsp. indica; identical to SEQ ID NO: 8785
  CDS (1)..(1308)

SEQ ID NO: 8987 - protein, 435 aa, Oryza sativa subsp. indica; identical to SEQ ID NO: 8786

SEQ ID NO: 8988 - DNA, 1305 bp, Vitis vinifera; identical to SEQ ID NO: 8787
  CDS (1)..(1305)

SEQ ID NO: 8989 - protein, 434 aa, Vitis vinifera; identical to SEQ ID NO: 8788

SEQ ID NO: 8990 - DNA, 1305 bp, Picea sitchensis; identical to SEQ ID NO: 8789
  CDS (1)..(1305)

SEQ ID NO: 8991 - protein, 434 aa, Picea sitchensis; identical to SEQ ID NO: 8790

SEQ ID NO: 8992 - DNA, 1302 bp, Vaccinium corymbosum; identical to SEQ ID NO: 8791
  CDS (1)..(1302)

SEQ ID NO: 8993 - protein, 433 aa, Vaccinium corymbosum; identical to SEQ ID NO: 8792

SEQ ID NO: 8994 - DNA, 1449 bp, Solanum lycopersicum; identical to SEQ ID NO: 8793
  CDS (1)..(1449)

SEQ ID NO: 8995 - protein, 482 aa, Solanum lycopersicum; identical to SEQ ID NO: 8794

SEQ ID NO: 8996 - DNA, 1506 bp, Zea mays; identical to SEQ ID NO: 8795
  CDS (1)..(1506)

SEQ ID NO: 8997 - protein, 501 aa, Zea mays; identical to SEQ ID NO: 8796

SEQ ID NO: 8998 - DNA, 1461 bp, Picrorhiza kurrooa; identical to SEQ ID NO: 8797
  CDS (1)..(1461)

SEQ ID NO: 8999 - protein, 486 aa, Picrorhiza kurrooa; identical to SEQ ID NO: 8798

SEQ ID NO: 9000 - DNA, 1305 bp, Camellia sinensis; identical to SEQ ID NO: 8799
  CDS (1)..(1305)

SEQ ID NO: 9001 - protein, 434 aa, Camellia sinensis; identical to SEQ ID NO: 8800

SEQ ID NO: 9002 - DNA, 1437 bp, Zea mays; identical to SEQ ID NO: 8801
  CDS (1)..(1437)

SEQ ID NO: 9003 - protein, 478 aa, Zea mays; identical to SEQ ID NO: 8802

SEQ ID NO: 9004 - DNA, 1536 bp, Oryza sativa subsp. indica; identical to SEQ ID NO: 8803
  CDS (1)..(1536)

SEQ ID NO: 9005 - protein, 511 aa, Oryza sativa subsp. indica; identical to SEQ ID NO: 8804

SEQ ID NO: 9006 - DNA, 1308 bp, Oncidium Gower Ramsey; identical to SEQ ID NO: 8805
  CDS (1)..(1308)

SEQ ID NO: 9007 - protein, 435 aa, Oncidium Gower Ramsey; identical to SEQ ID NO: 8806

SEQ ID NO: 9008 - DNA, 1623 bp, Oryza sativa subsp. japonica; identical to SEQ ID NO: 8809
  CDS (1)..(1623)

SEQ ID NO: 9009 - protein, 540 aa, Oryza sativa subsp. japonica; identical to SEQ ID NO: 8810

SEQ ID NO: 9010 - DNA, 1482 bp, Ricinus communis; identical to SEQ ID NO: 8811
  CDS (1)..(1482)

SEQ ID NO: 9011 - protein, 493 aa, Ricinus communis; identical to SEQ ID NO: 8812

SEQ ID NO: 9012 - DNA, 1437 bp, Ricinus communis; identical to SEQ ID NO: 8813
  CDS (1)..(1437)

SEQ ID NO: 9013 - protein, 478 aa, Ricinus communis; identical to SEQ ID NO: 8814

SEQ ID NO: 9014 - DNA, 1305 bp, Malus domestica; identical to SEQ ID NO: 8815
  CDS (1)..(1305)

SEQ ID NO: 9015 - protein, 434 aa, Malus domestica; identical to SEQ ID NO: 8816

SEQ ID NO: 9016 - DNA, 1302 bp, Zea mays; identical to SEQ ID NO: 8817
  CDS (1)..(1302)

SEQ ID NO: 9017 - protein, 433 aa, Zea mays; identical to SEQ ID NO: 8818

SEQ ID NO: 9018 - DNA, 1305 bp, Picea sitchensis; identical to SEQ ID NO: 8819
  CDS (1)..(1305)

SEQ ID NO: 9019 - protein, 434 aa, Picea sitchensis; identical to SEQ ID NO: 8820

SEQ ID NO: 9020 - DNA, 1344 bp, Micromonas sp. RCC299; identical to SEQ ID NO: 8821
  CDS (1)..(1344)

SEQ ID NO: 9021 - protein, 447 aa, Micromonas sp. RCC299; identical to SEQ ID NO: 8822

SEQ ID NO: 9022 - DNA, 1401 bp, Micromonas pusilla CCMP1545; identical to SEQ ID NO: 8823
  CDS (1)..(1401)

SEQ ID NO: 9023 - protein, 466 aa, Micromonas pusilla CCMP1545; identical to SEQ ID NO: 8824

SEQ ID NO: 9024 - DNA, 1308 bp, Ostreococcus tauri; identical to SEQ ID NO: 8825
  CDS (1)..(1308)

SEQ ID NO: 9025 - protein, 435 aa, Ostreococcus tauri; identical to SEQ ID NO: 8826

SEQ ID NO: 9026 - DNA, 1305 bp, Rheum australe; identical to SEQ ID NO: 8827
  CDS (1)..(1305)

SEQ ID NO: 9027 - protein, 434 aa, Rheum australe; identical to SEQ ID NO: 8828

SEQ ID NO: 9028 - DNA, 1449 bp, Solanum lycopersicum; identical to SEQ ID NO: 8829
  CDS (1)..(1449)

SEQ ID NO: 9029 - protein, 482 aa, Solanum lycopersicum; identical to SEQ ID NO: 8830

SEQ ID NO: 9030 - DNA, 1302 bp, Pisum sativum; identical to SEQ ID NO: 8831
  CDS (1)..(1302)

SEQ ID NO: 9031 - protein, 433 aa, Pisum sativum; identical to SEQ ID NO: 8832

SEQ ID NO: 9032 - DNA, 1305 bp, Brassica oleracea; identical to SEQ ID NO: 8833
  CDS (1)..(1305)

SEQ ID NO: 9033 - protein, 434 aa, Brassica oleracea; identical to SEQ ID NO: 8834

SEQ ID NO: 9034 - DNA, 1461 bp, Brassica oleracea; identical to SEQ ID NO: 8835
  CDS (1)..(1461)

SEQ ID NO: 9035 - protein, 486 aa, Brassica oleracea; identical to SEQ ID NO: 8836

SEQ ID NO: 9036 - DNA, 1305 bp, Brassica rapa subsp. pekinensis; identical to SEQ ID NO: 8837
  CDS (1)..(1305)

SEQ ID NO: 9037 - protein, 434 aa, Brassica rapa subsp. pekinensis; identical to SEQ ID NO: 8838

SEQ ID NO: 9038 - DNA, 1434 bp, Mesembryanthemum crystallinum; identical to SEQ ID NO: 8839
  CDS (1)..(1434)

SEQ ID NO: 9039 - protein, 477 aa, Mesembryanthemum crystallinum; identical to SEQ ID NO: 8840

SEQ ID NO: 9040 - DNA, 1494 bp, Spinacia oleracea; identical to SEQ ID NO: 8841
  CDS (1)..(1494)

SEQ ID NO: 9041 - protein, 497 aa, Spinacia oleracea; identical to SEQ ID NO: 8842

SEQ ID NO: 9042 - DNA, 1452 bp, Brassica juncea; identical to SEQ ID NO: 8843
  CDS (1)..(1452)

SEQ ID NO: 9043 - protein, 483 aa, Brassica juncea; identical to SEQ ID NO: 8844

SEQ ID NO: 9044 - DNA, 1308 bp, Oryza sativa subsp. japonica; identical to SEQ ID NO: 8845
  CDS (1)..(1308)

SEQ ID NO: 9045 - protein, 435 aa, Oryza sativa subsp. japonica; identical to SEQ ID NO: 8846

SEQ ID NO: 9046 - DNA, 1305 bp, Cucumis sativus; identical to SEQ ID NO: 8847
  CDS (1)..(1305)

SEQ ID NO: 9047 - protein, 434 aa, Cucumis sativus; identical to SEQ ID NO: 8848

SEQ ID NO: 9048 - DNA, 1302 bp, Pisum sativum; identical to SEQ ID NO: 8849
  CDS (1)..(1302)

SEQ ID NO: 9049 - protein, 433 aa, Pisum sativum; identical to SEQ ID NO: 8850

SEQ ID NO: 9050 - DNA, 1302 bp, Solanum lycopersicum; identical to SEQ ID NO: 8851
  CDS (1)..(1302)

SEQ ID NO: 9051 - protein, 433 aa, Solanum lycopersicum; identical to SEQ ID NO: 8852

SEQ ID NO: 9052 - DNA, 1437 bp, Oryza sativa; identical to SEQ ID NO: 8853
  CDS (1)..(1437)

SEQ ID NO: 9053 - protein, 478 aa, Oryza sativa; identical to SEQ ID NO: 8854

SEQ ID NO: 9054 - DNA, 1308 bp, Brassica napus; identical to SEQ ID NO: 8855
  CDS (1)..(1308)

SEQ ID NO: 9055 - protein, 435 aa, Brassica napus; identical to SEQ ID NO: 8856

SEQ ID NO: 9056 - DNA, 1437 bp, Glycine max; identical to SEQ ID NO: 8857
  CDS (1)..(1437)

SEQ ID NO: 9057 - protein, 478 aa, Glycine max; identical to SEQ ID NO: 8858

SEQ ID NO: 9058 - DNA, 1467 bp, Zea mays; identical to SEQ ID NO: 8859
  CDS (1)..(1467)

SEQ ID NO: 9059 - protein, 488 aa, Zea mays; identical to SEQ ID NO: 8860

SEQ ID NO: 9060 - DNA, 1308 bp, Brassica napus; identical to SEQ ID NO: 8861
  CDS (1)..(1308)

SEQ ID NO: 9061 - protein, 435 aa, Brassica napus; identical to SEQ ID NO: 8862

SEQ ID NO: 9062 - DNA, 1305 bp, Brassica napus; identical to SEQ ID NO: 8863
  CDS (1)..(1305)

SEQ ID NO: 9063 - protein, 434 aa, Brassica napus; identical to SEQ ID NO: 8864

SEQ ID NO: 9064 - DNA, 1308 bp, Brassica napus; identical to SEQ ID NO: 8865
  CDS (1)..(1308)

SEQ ID NO: 9065 - protein, 435 aa, Brassica napus; identical to SEQ ID NO: 8866

SEQ ID NO: 9066 - DNA, 1500 bp, Zea mays; identical to SEQ ID NO: 8867
  CDS (1)..(1500)

SEQ ID NO: 9067 - protein, 499 aa, Zea mays; identical to SEQ ID NO: 8868

SEQ ID NO: 9068 - DNA, 1302 bp, Glycine max; identical to SEQ ID NO: 8869
  CDS (1)..(1302)

SEQ ID NO: 9069 - protein, 433 aa, Glycine max; identical to SEQ ID NO: 8870

SEQ ID NO: 9070 - DNA, 1437 bp, Glycine max; identical to SEQ ID NO: 8871
  CDS (1)..(1437)

SEQ ID NO: 9071 - protein, 478 aa, Glycine max; identical to SEQ ID NO: 8872

SEQ ID NO: 9072 - DNA, 1437 bp, Glycine max; identical to SEQ ID NO: 8875
  CDS (1)..(1437)

SEQ ID NO: 9073 - protein, 478 aa, Glycine max; identical to SEQ ID NO: 8876

SEQ ID NO: 9074 - DNA, 1302 bp, Glycine max; identical to SEQ ID NO: 8877
  CDS (1)..(1302)

SEQ ID NO: 9075 - protein, 433 aa, Glycine max; identical to SEQ ID NO: 8878

SEQ ID NO: 9076 - DNA, 1341 bp, Oryza sativa; identical to SEQ ID NO: 8879
  CDS (1)..(1341)

SEQ ID NO: 9077 - protein, 446 aa, Oryza sativa; identical to SEQ ID NO: 8880

SEQ ID NO: 9078 - DNA, 1467 bp, Zea mays; identical to SEQ ID NO: 8881
  CDS (1)..(1467)

SEQ ID NO: 9079 - protein, 488 aa, Zea mays; identical to SEQ ID NO: 8882

SEQ ID NO: 9080 - DNA, 1500 bp, Zea mays; identical to SEQ ID NO: 8883
  CDS (1)..(1500)

SEQ ID NO: 9081 - protein, 499 aa, Zea mays; identical to SEQ ID NO: 8884

SEQ ID NO: 9082 - DNA, 1431 bp, Triticum aestivum; identical to SEQ ID NO: 8885
  CDS (1)..(1431)

SEQ ID NO: 9083 - protein, 476 aa, Triticum aestivum; identical to SEQ ID NO: 8886

SEQ ID NO: 9084 - DNA, 1458 bp, Triticum aestivum; identical to SEQ ID NO: 8887
  CDS (1)..(1458)

SEQ ID NO: 9085 - protein, 485 aa, Triticum aestivum; identical to SEQ ID NO: 8888

SEQ ID NO: 9086 - DNA, 1308 bp, Triticum aestivum; identical to SEQ ID NO: 8889
  CDS (1)..(1308)

SEQ ID NO: 9087 - protein, 435 aa, Triticum aestivum; identical to SEQ ID NO: 8890

SEQ ID NO: 9088 - DNA, 1308 bp, Triticum aestivum; identical to SEQ ID NO: 8891
  CDS (1)..(1308)

SEQ ID NO: 9089 - protein, 435 aa, Triticum aestivum; identical to SEQ ID NO: 8892

SEQ ID NO: 9090 - DNA, 1302 bp, Zea mays; identical to SEQ ID NO: 8893
  CDS (1)..(1302)

SEQ ID NO: 9091 - protein, 433 aa, Zea mays; identical to SEQ ID NO: 8894

SEQ ID NO: 9092 - DNA, 1308 bp, Zea mays; identical to SEQ ID NO: 8895
  CDS (1)..(1308)

SEQ ID NO: 9093 - protein, 435 aa, Zea mays; identical to SEQ ID NO: 8896

SEQ ID NO: 9094 - DNA, 21 bp, Artificial sequence
  primer
atgtctgcagttcgtagagtc

SEQ ID NO: 9095 - DNA, 21 bp, Artificial sequence
  primer
ctaactctgtagagcggcttg

SEQ ID NO: 9096 - protein, 526 aa, Artificial sequence
  consensus sequence
  Variant (4)..(4): Xaa in position 4 is any amino acid
  Variant (8)..(9): Xaa in position 8 to 9 is any amino acid
  Variant (15)..(16): Xaa in position 15 to 16 is any amino acid
  Variant (18)..(23): Xaa in position 18 to 23 is any amino acid
  Variant (24)..(28): Xaa in position 24 to 28 is any or no amino acid
  Variant (30)..(30): Xaa in position 30 is any amino acid
  Variant (32)..(32): Xaa in position 32 is any amino acid
  Variant (34)..(36): Xaa in position 34 to 36 is any amino acid
  Variant (38)..(40): Xaa in position 38 to 40 is any amino acid
  Variant (48)..(48): Xaa in position 48 is any amino acid
  Variant (50)..(50): Xaa in position 50 is any amino acid
  Variant (53)..(53): Xaa in position 53 is any amino acid
  Variant (55)..(55): Xaa in position 55 is any amino acid
  Variant (56)..(59): Xaa in position 56 to 59 is any or no amino acid
  Variant (64)..(64): Xaa in position 64 is any amino acid
  Variant (67)..(67): Xaa in position 67 is any amino acid
  Variant (71)..(71): Xaa in position 71 is any amino acid
  Variant (73)..(73): Xaa in position 73 is any amino acid
  Variant (75)..(79): Xaa in position 75 to 79 is any amino acid
  Variant (82)..(82): Xaa in position 82 is any amino acid
  Variant (84)..(84): Xaa in position 84 is any amino acid
  Variant (88)..(97): Xaa in position 88 to 97 is any amino acid
  Variant (99)..(102): Xaa in position 99 to 102 is any amino acid
  Variant (105)..(108): Xaa in position 105 to 108 is any amino acid
  Variant (110)..(113): Xaa in position 110 to 113 is any amino acid
  Variant (115)..(116): Xaa in position 115 to 116 is any amino acid
  Variant (117)..(117): Xaa in position 117 is any or no amino acid
  Variant (119)..(120): Xaa in position 119 to 120 is any amino acid
  Variant (124)..(128): Xaa in position 124 to 128 is any amino acid
  Variant (130)..(132): Xaa in position 130 to 132 is any amino acid
  Variant (133)..(135): Xaa in position 133 to 135 is any or no amino acid
  Variant (137)..(142): Xaa in position 137 to 142 is any amino acid
  Variant (143)..(144): Xaa in position 143 to 144 is any or no amino acid
  Variant (146)..(146): Xaa in position 146 is any amino acid
  Variant (148)..(150): Xaa in position 148 to 150 is any amino acid
  Variant (154)..(154): Xaa in position 154 is any amino acid
  Variant (156)..(165): Xaa in position 156 to 165 is any amino acid
  Variant (166)..(169): Xaa in position 166 to 169 is any or no amino acid
  Variant (171)..(172): Xaa in position 171 to 172 is any amino acid
  Variant (179)..(179): Xaa in position 179 is any amino acid
  Variant (181)..(182): Xaa in position 181 to 182 is any amino acid
  Variant (184)..(192): Xaa in position 184 to 192 is any amino acid
  Variant (193)..(194): Xaa in position 193 to 194 is any or no amino acid
  Variant (196)..(198): Xaa in position 196 to 198 is any amino acid
  Variant (201)..(203): Xaa in position 201 to 203 is any amino acid
  Variant (205)..(205): Xaa in position 205 is any amino acid
  Variant (210)..(212): Xaa in position 210 to 212 is any amino acid
  Variant (214)..(215): Xaa in position 214 to 215 is any amino acid
  Variant (218)..(219): Xaa in position 218 to 219 is any amino acid
  Variant (221)..(223): Xaa in position 221 to 223 is any amino acid
  Variant (225)..(228): Xaa in position 225 to 228 is any amino acid
  Variant (231)..(240): Xaa in position 231 to 240 is any amino acid
  Variant (241)..(247): Xaa in position 241 to 247 is any or no amino acid
  Variant (249)..(249): Xaa in position 249 is any amino acid
  Variant (251)..(252): Xaa in position 251 to 252 is any amino acid
  Variant (254)..(254): Xaa in position 254 is any amino acid
  Variant (256)..(257): Xaa in position 256 to 257 is any amino acid
  Variant (259)..(262): Xaa in position 259 to 262 is any amino acid
  Variant (265)..(265): Xaa in position 265 is any amino acid
  Variant (267)..(267): Xaa in position 267 is any amino acid
  Variant (268)..(296): Xaa in position 268 to 296 is any or no amino acid
  Variant (299)..(299): Xaa in position 299 is any amino acid
  Variant (301)..(302): Xaa in position 301 to 302 is any amino acid
  Variant (304)..(306): Xaa in position 304 to 306 is any amino acid
  Variant (307)..(307): Xaa in position 307 is any or no amino acid
  Variant (309)..(316): Xaa in position 309 to 316 is any amino acid
  Variant (317)..(321): Xaa in position 317 to 321 is any or no amino acid
  Variant (325)..(326): Xaa in position 325 to 326 is any amino acid
  Variant (328)..(338): Xaa in position 328 to 338 is any amino acid
  Variant (339)..(343): Xaa in position 339 to 343 is any or no amino acid
  Variant (345)..(345): Xaa in position 345 is any amino acid
  Variant (350)..(350): Xaa in position 350 is any amino acid
  Variant (353)..(353): Xaa in position 353 is any amino acid
  Variant (355)..(357): Xaa in position 355 to 357 is any amino acid
  Variant (358)..(373): Xaa in position 358 to 373 is any or no amino acid
  Variant (375)..(375): Xaa in position 375 is any amino acid
  Variant (380)..(380): Xaa in position 380 is any amino acid
  Variant (383)..(383): Xaa in position 383 is any amino acid
  Variant (386)..(388): Xaa in position 386 to 388 is any amino acid
  Variant (390)..(392): Xaa in position 390 to 392 is any amino acid
  Variant (393)..(407): Xaa in position 393 to 407 is any or no amino acid
  Variant (412)..(412): Xaa in position 412 is any amino acid
  Variant (417)..(417): Xaa in position 417 is any amino acid
  Variant (419)..(421): Xaa in position 419 to 421 is any amino acid
  Variant (422)..(428): Xaa in position 422 to 428 is any or no amino acid
  Variant (436)..(437): Xaa in position 436 to 437 is any amino acid
  Variant (440)..(441): Xaa in position 440 to 441 is any amino acid
  Variant (442)..(443): Xaa in position 442 to 443 is any or no amino acid
  Variant (445)..(446): Xaa in position 445 to 446 is any amino acid
  Variant (448)..(456): Xaa in position 448 to 456 is any amino acid
  Variant (457)..(466): Xaa in position 457 to 466 is any or no amino acid
  Variant (468)..(473): Xaa in position 468 to 473 is any amino acid
  Variant (474)..(485): Xaa in position 474 to 485 is any or no amino acid
  Variant (487)..(488): Xaa in position 487 to 488 is any amino acid
  Variant (491)..(491): Xaa in position 491 is any amino acid
  Variant (493)..(495): Xaa in position 493 to 495 is any amino acid
  Variant (497)..(507): Xaa in position 497 to 507 is any amino acid
  Variant (509)..(522): Xaa in position 509 to 522 is any amino acid
  Variant (523)..(525): Xaa in position 523 to 525 is any or no amino acid
YVIXGGGXXAGYAAXXFXXXXXXXXXXXGXLXIXXXEXXXPYERPALXKXYLXPXXXXXARLPXFHXCVGXGXEXXXXXWYXEXGIEXXXXXXXXXXDXXXXTLXXXXGXXXXYXXXLXXATGXXXXXLXXXXXXGXXXXXXXXYXRXXXDADXLXXXXXXXXXXXXXXVXXGGGYIGXEXXAXXXXXXXXXXXTXXXPEXXXMXRLFTXXXAXXYEXXYXXXGXXXXKGXXXXXXXXXXXXXXXXXGXVXXVXLXXGXXXXADXVXXXXXXXXXXXXXXXXXXXXXXXXXXXXXXVGXGXXPXXXXFXXXXXXXXXXXXXGGIXXDXXXXXXXXXXXXXXXXAXGDVAXFPXKXXXXXXXXXXXXXXXXXXXRXEHVDXARXSAXXXVXXXXXXXXXXXXXXXXXXDYLPXFYSRXFXXXXXXXXXXWQFYGDNXXVGXXXXVXXGXXXXXXXXXXXXXXXXXXXWXXXXXXXXXXXXXXXXXXGXXLEXGXXXEXXXXXXXXXXXPXXXXXXXXXXXXXXXXXA

SEQ ID NO: 9097 - protein, 26 aa, Artificial sequence
  protein pattern
  Variant (5)..(5): Xaa in position 5 is Ala, Pro or Ser
  Variant (6)..(6): Xaa in position 6 is any amino acid
  Variant (7)..(7): Xaa in position 7 is Ile or Leu
  Variant (9)..(10): Xaa in position 9 to 10 is any amino acid
  Variant (13)..(18): Xaa in position 13 to 18 is any or no amino acid
  Variant (20)..(20): Xaa in position 20 is Ile or Val
  Variant (21)..(21): Xaa in position 21 is any amino acid
  Variant (22)..(22): Xaa in position 22 is Phe or Ile
  Variant (23)..(23): Xaa in position 23 is Ile, Leu or Val
  Variant (26)..(26): Xaa in position 26 is Ala or Thr
RLFTXXXAXXYEXXXXXXGXXXXKGX

SEQ ID NO: 9098 - protein, 21 aa, Artificial sequence
  protein pattern
  Variant (4)..(4): Xaa in position 4 is Glu, Gly or Ser
  Variant (7)..(7): Xaa in position 7 is Thr or Val
  Variant (8)..(8): Xaa in position 8 is Cys or Ser
  Variant (11)..(11): Xaa in position 11 is any amino acid
  Variant (12)..(12): Xaa in position 12 is Gly or Asn
  Variant (13)..(13): Xaa in position 13 is any amino acid
  Variant (14)..(14): Xaa in position 14 is Asp, Glu or Gln
  Variant (15)..(19): Xaa in position 15 to 19 is any amino acid
RLPXFHXXVGXXXXXXXXXWY

SEQ ID NO: 9099 - protein, 16 aa, Artificial sequence
  protein pattern
  Variant (2)..(4): Xaa in position 2 to 4 is any amino acid
  Variant (5)..(5): Xaa in position 5 is Ile or Val
  Variant (6)..(6): Xaa in position 6 is Phe or Tyr
  Variant (7)..(7): Xaa in position 7 is Ala or Thr
  Variant (8)..(8): Xaa in position 8 is Ile, Leu or Val
  Variant (11)..(11): Xaa in position 11 is Ile or Val
  Variant (13)..(13): Xaa in position 13 is Ala, Ser or Thr
  Variant (16)..(16): Xaa in position 16 is Ile, Leu, Met or Val
SXXXXXXXGDXAXFPX

SEQ ID NO: 9100 - protein, 12 aa, Artificial sequence
  protein pattern
  Variant (4)..(4): Xaa in position 4 is any amino acid
  Variant (5)..(5): Xaa in position 5 is Ala or Ser
  Variant (7)..(7): Xaa in position 7 is Lys or Arg
  Variant (10)..(11): Xaa in position 10 to 11 is any amino acid
  Variant (12)..(12): Xaa in position 12 is Ala, Cys or Val
HVDXXRXSAXXX

SEQ ID NO: 9101 - protein, 14 aa, Artificial sequence
  protein pattern
  Variant (8)..(8): Xaa in position 8 is Ser or Thr
  Variant (10)..(10): Xaa in position 10 is Ala or Gly
  Variant (12)..(13): Xaa in position 12 to 13 is any or no amino acid
PYERPALXKXYXXL

SEQ ID NO: 9102 - protein, 18 aa, Artificial sequence
  protein pattern
  Variant (7)..(7): Xaa in position 7 is Leu or Met
  Variant (9)..(9): Xaa in position 9 is any amino acid
  Variant (10)..(10): Xaa in position 10 is Ala or Ser
  Variant (12)..(12): Xaa in position 12 is any amino acid
  Variant (13)..(17): Xaa in position 13 to 17 is any or no amino acid
GGGYIGXEXXAXXXXXXL

SEQ ID NO: 9103 - protein, 14 aa, Artificial sequence
  protein pattern
  Variant (5)..(5): Xaa in position 5 is Phe or Tyr
  Variant (10)..(10): Xaa in position 10 is any amino acid
  Variant (12)..(12): Xaa in position 12 is Asp, Glu, Asn or Thr
  Variant (13)..(13): Xaa in position 13 is any amino acid
  Variant (14)..(14): Xaa in position 14 is Ala, Glu, Gly or Ser
DYLPXFYSRXFXXX

SEQ ID NO: 9104 - protein, 14 aa, Artificial sequence
  protein pattern
  Variant (2)..(2): Xaa in position 2 is Phe or Tyr
  Variant (4)..(4): Xaa in position 4 is Asp or Glu
  Variant (8)..(8): Xaa in position 8 is Asp, Glu or Lys
  Variant (9)..(9): Xaa in position 9 is Ala, Asp, Ser, Thr or Val
  Variant (10)..(10): Xaa in position 10 is Ile or Val
  Variant (11)..(12): Xaa in position 11 to 12 is any amino acid
  Variant (14)..(14): Xaa in position 14 is Asp, Asn, Arg or Ser
FXGXNVGXXXXXGX

SEQ ID NO: 9105 - protein, 12 aa, Artificial sequence
  protein pattern
  Variant (3)..(3): Xaa in position 3 is Asn or Val
  Variant (4)..(4): Xaa in position 4 is Ala or Ser
  Variant (10)..(10): Xaa in position 10 is any amino acid
  Variant (11)..(11): Xaa in position 11 is Glu, Gln, Ser or Thr
GGXXAGYAAXXF

SEQ ID NO: 9106 - protein, 16 aa, Artificial sequence
  protein pattern
  Variant (2)..(3): Xaa in position 2 to 3 is any amino acid
  Variant (5)..(5): Xaa in position 5 is any or no amino acid
  Variant (7)..(7): Xaa in position 7 is any or no amino acid
  Variant (11)..(11): Xaa in position 11 is Ala, Cys, Ser or Thr
  Variant (12)..(15): Xaa in position 12 to 15 is any amino acid
  Variant (16)..(16): Xaa in position 16 is Phe or Leu
YXXLXIXATGXXXXXX

SEQ ID NO: 9107 - protein, 18 aa, Artificial sequence
  protein pattern
  Variant (2)..(2): Xaa in position 2 is Ala, Gly or Ser
  Variant (3)..(5): Xaa in position 3 to 5 is any amino acid
  Variant (6)..(6): Xaa in position 6 is Gly or Asn
  Variant (7)..(7): Xaa in position 7 is Ile or Val
  Variant (8)..(8): Xaa in position 8 is any amino acid
  Variant (10)..(10): Xaa in position 10 is Ile or Leu
  Variant (12)..(14): Xaa in position 12 to 14 is any or no amino acid
  Variant (16)..(16): Xaa in position 16 is any or no amino acid
GXXXXXXXYXRXXXDXAD

SEQ ID NO: 9108 - protein, 20 aa, Artificial sequence
  protein pattern
  Variant (2)..(2): Xaa in position 2 is any amino acid
  Variant (3)..(3): Xaa in position 3 is Asp or Asn
  Variant (5)..(6): Xaa in position 5 to 6 is any amino acid
  Variant (7)..(7): Xaa in position 7 is Ile, Leu or Val
  Variant (8)..(8): Xaa in position 8 is Asp, Glu, Pro or Ser
  Variant (9)..(9): Xaa in position 9 is Ala, Ser, Thr or Val
  Variant (10)..(10): Xaa in position 10 is Asp, Asn or Thr
  Variant (11)..(11): Xaa in position 11 is any amino acid
  Variant (13)..(13): Xaa in position 13 is any or no amino acid
  Variant (15)..(15): Xaa in position 15 is any or no amino acid
  Variant (17)..(17): Xaa in position 17 is Ile or Val
  Variant (19)..(19): Xaa in position 19 is Ala, Gly or Ile
  Variant (20)..(20): Xaa in position 20 is Lys or Arg
LXXGXXXXXXXVXVXGXGXX

SEQ ID NO: 9109 - DNA, 471 bp, Arabidopsis thaliana; identical to SEQ ID NO: 8178
  CDS (1)..(471)

SEQ ID NO: 9110 - protein, 156 aa, Arabidopsis thaliana; identical to SEQ ID NO: 8179

SEQ ID NO: 9111 - DNA, 471 bp, Arabidopsis thaliana
  CDS (1)..(471)
atgtctctagttccgagcttttttggaggccgaagaacaaacgtgttcgacccattttcactagacgtatgggatccgttcgaaggattcttgacgcccgggttgacaaacgcacctgccaaggacgtggcagcgttcacaaacgctaaagtggactggagggagacacctgaagcgcatgtgttcaaggcggacgtgcctgggcttaagaaggaagaggtgaaggtggaggttgaagatggtaacatacttcagataagcggtgagaggagcagtgagaatgaagagaagagtgacacatggcaccgtgtggagcggtcaagtgggaagttcatgaggaggtttcggttgccagagaatgcaaaggtggaggaagtaaaggcgagtatggagaatggggtgttgtcggttacggtgccgaaagttcaggagagtaagccggaggtcaagtccattgatatctctggttaa

SEQ ID NO: 9112 - protein, 156 aa, Arabidopsis thaliana
MSLVPSFFGGRRTNVFDPFSLDVWDPFEGFLTPGLTNAPAKDVAAFTNAKVDWRETPEAHVFKADVPGLKKEEVKVEVEDGNILQISGERSSENEEKSDTWHRVERSSGKFMRRFRLPENAKVEEVKASMENGVLSVTVPKVQESKPEVKSIDISG

SEQ ID NO: 9113 - DNA, 471 bp, Arabidopsis thaliana
  CDS (1)..(471)
atgtctctagttccgaccttttttggaggccgaagaacaaacgtgttcgacccattttcactagacgtatgggatccgttcgaaggattcttgacgcccgggttgacaaacgcacctgccaaggacgtggcagcgttcacaaacgctaaagtggactggagggagacacctgaagcgcatgtgttcaaggcggacgtgcctgggcttaagaaggaagaggtgaaggtggaggttgaagatggtaacatacttcagataagcggtgagaggagcagtgagaatgaagagaagagtgacacatggcaccgtgtggagcggtcaagtgggaagttcatgaggaggtttcggttgccagagaatgcaaaggtggaggaagtaaaggcgagtatggagaatggggtgttgtcggttacggtgccgaaagttcaggagagtaagccggaggtcaagtccgttgatatctctggttaa

SEQ ID NO: 9114 - protein, 156 aa, Arabidopsis thaliana
MSLVPTFFGGRRTNVFDPFSLDVWDPFEGFLTPGLTNAPAKDVAAFTNAKVDWRETPEAHVFKADVPGLKKEEVKVEVEDGNILQISGERSSENEEKSDTWHRVERSSGKFMRRFRLPENAKVEEVKASMENGVLSVTVPKVQESKPEVKSVDISG

SEQ ID NO: 9115 - DNA, 468 bp, Zea mays; identical to SEQ ID NO: 8096
  CDS (1)..(468)

SEQ ID NO: 9116 - protein, 155 aa, Zea mays; identical to SEQ ID NO: 8097

SEQ ID NO: 9117 - DNA, 453 bp, Oryza sativa; identical to SEQ ID NO: 8098
  CDS (1)..(453)

SEQ ID NO: 9118 - protein, 150 aa, Oryza sativa; identical to SEQ ID NO: 8099

SEQ ID NO: 9119 - DNA, 501 bp, Oryza sativa; identical to SEQ ID NO: 8100
  CDS (1)..(501)

SEQ ID NO: 9120 - protein, 166 aa, Oryza sativa; identical to SEQ ID NO: 8101

SEQ ID NO: 9121 - DNA, 450 bp, Oryza sativa; identical to SEQ ID NO: 8102
  CDS (1)..(450)

SEQ ID NO: 9122 - protein, 149 aa, Oryza sativa; identical to SEQ ID NO: 8103

SEQ ID NO: 9123 - DNA, 453 bp, Oryza sativa; identical to SEQ ID NO: 8104
  CDS (1)..(453)

SEQ ID NO: 9124 - protein, 150 aa, Oryza sativa; identical to SEQ ID NO: 8105

SEQ ID NO: 9125 - DNA, 453 bp, Oryza sativa; identical to SEQ ID NO: 8106
  CDS (1)..(453)

SEQ ID NO: 9126 - protein, 150 aa, Oryza sativa; identical to SEQ ID NO: 8107

SEQ ID NO: 9127 - DNA, 534 bp, Oryza sativa; identical to SEQ ID NO: 8108
  CDS (1)..(534)

SEQ ID NO: 9128 - protein, 177 aa, Oryza sativa; identical to SEQ ID NO: 8109

SEQ ID NO: 9129 - DNA, 528 bp, Oryza sativa
  CDS (1)..(528)
atggagttgtcggtggtcggcggcgagccgttgctggcggtggcgatgcagcagctgctggacctggacctccccgatgagctggagcggcagctcaacccgccgacgcgcgcctacgtgcgcgaccgccgcgccatggccaacacccccatggacgtcaaggagctccgggcctccggcgcgctcgtgctcgccgtcgacatgcccggcgtcgcccccgccgacgtccgggtcgaggtcgaggacggcaacgtgctcgccatcagcggcgagcgcaggcgccccgccggcgacggcgacgacggcggcgagggggtgaagtacctgaggatggagcggcggatgggcaagttcatgaggaggttcccgctgccggagagcgccgacctcgacggcgtccgcgccgagtacaaggacggggtgctcaccgtcaccgtcgacaagaagccgccaccggagcccaagaagccgcgcgtcgtcgaggtcaaggtcgccggcgccggcgagcccaagggcaagggcaagtag

SEQ ID NO: 9130 - protein, 175 aa, Oryza sativa
MELSVVGGEPLLAVAMQQLLDLDLPDELERQLNPPTRAYVRDRRAMANTPMDVKELRASGALVLAVDMPGVAPADVRVEVEDGNVLAISGERRRPAGDGDDGGEGVKYLRMERRMGKFMRRFPLPESADLDGVRAEYKDGVLTVTVDKKPPPEPKKPRVVEVKVAGAGEPKGKGK

SEQ ID NO: 9131 - DNA, 486 bp, Oryza sativa; identical to SEQ ID NO: 8110
  CDS (1)..(486)

SEQ ID NO: 9132 - protein, 161 aa, Oryza sativa; identical to SEQ ID NO: 8111

SEQ ID NO: 9133 - DNA, 465 bp, Oryza sativa; identical to SEQ ID NO: 8112
  CDS (1)..(465)

SEQ ID NO: 9134 - protein, 154 aa, Oryza sativa; identical to SEQ ID NO: 8113

SEQ ID NO: 9135 - DNA, 486 bp, Oryza sativa; identical to SEQ ID NO: 8114
  CDS (1)..(486)

SEQ ID NO: 9136 - protein, 161 aa, Oryza sativa; identical to SEQ ID NO: 8115

SEQ ID NO: 9137 - DNA, 480 bp, Oryza sativa; identical to SEQ ID NO: 8116
  CDS (1)..(480)

SEQ ID NO: 9138 - protein, 159 aa, Oryza sativa; identical to SEQ ID NO: 8117

SEQ ID NO: 9139 - DNA, 462 bp, Glycine max; identical to SEQ ID NO: 8118
  CDS (1)..(462)

SEQ ID NO: 9140 - protein, 153 aa, Glycine max; identical to SEQ ID NO: 8119

SEQ ID NO: 9141 - DNA, 462 bp, Glycine max; identical to SEQ ID NO: 8120
  CDS (1)..(462)

SEQ ID NO: 9142 - protein, 153 aa, Glycine max; identical to SEQ ID NO: 8121

SEQ ID NO: 9143 - DNA, 462 bp, Glycine max; identical to SEQ ID NO: 8122
  CDS (1)..(462)

SEQ ID NO: 9144 - protein, 153 aa, Glycine max; identical to SEQ ID NO: 8123

SEQ ID NO: 9145 - DNA, 462 bp, Glycine max; identical to SEQ ID NO: 8124
  CDS (1)..(462)

SEQ ID NO: 9146 - protein, 153 aa, Glycine max; identical to SEQ ID NO: 8125

SEQ ID NO: 9147 - DNA, 426 bp, Glycine max
  CDS (1)..(426)
atgtcactgattccaagtttcttcggtggtcgaaggagcaatgttttcgaccctttcgcgctcgacgtatggggccccttcaaggatttgtctttcccttcttcgctttctgctgaaaattctgcgttcgtgaacacccgattggattggaaggagaccccagaagcccacgtgttcaaggttgatattccggggctgaagaaggaacaagtgaaggtggagattgaagatgacaaggttcttcggataagcggagagaggagcgtggagcgcagtagtgctaagttcttgaggaagttcagattgccagaaaacactaaatttgatcaagttaaggcttctatggaaaatggggttctcactgtcactcttccaaaggaagaggtcaagaagcctgatgttaaggctgtgcaaatttctggttga

SEQ ID NO: 9148 - protein, 141 aa, Glycine max
MSLIPSFFGGRRSNVFDPFALDVWGPFKDLSFPSSLSAENSAFVNTRLDWKETPEAHVFKVDIPGLKKEQVKVEIEDDKVLRISGERSVERSSAKFLRKFRLPENTKFDQVKASMENGVLTVTLPKEEVKKPDVKAVQISG

SEQ ID NO: 9149 - DNA, 516 bp, Glycine max; identical to SEQ ID NO: 8618
  CDS (1)..(516)

SEQ ID NO: 9150 - protein, 171 aa, Glycine max; identical to SEQ ID NO: 8619

SEQ ID NO: 9151 - DNA, 453 bp, Glycine max; identical to SEQ ID NO: 8126
  CDS (1)..(453)

SEQ ID NO: 9152 - protein, 150 aa, Glycine max; identical to SEQ ID NO: 8127

SEQ ID NO: 9153 - DNA, 462 bp, Glycine max; identical to SEQ ID NO: 8510
  CDS (1)..(462)

SEQ ID NO: 9154 - protein, 153 aa, Glycine max; identical to SEQ ID NO: 8511

SEQ ID NO: 9155 - DNA, 465 bp, Glycine max; identical to SEQ ID NO: 8128
  CDS (1)..(465)

SEQ ID NO: 9156 - protein, 154 aa, Glycine max; identical to SEQ ID NO: 8129

SEQ ID NO: 9157 - DNA, 465 bp, Glycine max; identical to SEQ ID NO: 8130
  CDS (1)..(465)

SEQ ID NO: 9158 - protein, 154 aa, Glycine max; identical to SEQ ID NO: 8131

SEQ ID NO: 9159 - DNA, 465 bp, Glycine max; identical to SEQ ID NO: 8132
  CDS (1)..(465)

SEQ ID NO: 9160 - protein, 154 aa, Glycine max; identical to SEQ ID NO: 8133

SEQ ID NO: 9161 - DNA, 486 bp, Glycine max; identical to SEQ ID NO: 8134
  CDS (1)..(486)

SEQ ID NO: 9162 - protein, 161 aa, Glycine max; identical to SEQ ID NO: 8135

SEQ ID NO: 9163 - DNA, 459 bp, Glycine max; identical to SEQ ID NO: 8136
  CDS (1)..(459)

SEQ ID NO: 9164 - protein, 152 aa, Glycine max; identical to SEQ ID NO: 8137

SEQ ID NO: 9165 - DNA, 486 bp, Glycine max; identical to SEQ ID NO: 8138
  CDS (1)..(486)

SEQ ID NO: 9166 - protein, 161 aa, Glycine max; identical to SEQ ID NO: 8139

SEQ ID NO: 9167 - DNA, 462 bp, Glycine max; identical to SEQ ID NO: 8140
  CDS (1)..(462)

SEQ ID NO: 9168 - protein, 153 aa, Glycine max; identical to SEQ ID NO: 8141

SEQ ID NO: 9169 - DNA, 462 bp, Glycine max; identical to SEQ ID NO: 8142
  CDS (1)..(462)

SEQ ID NO: 9170 - protein, 153 aa, Glycine max; identical to SEQ ID NO: 8143

SEQ ID NO: 9171 - DNA, 462 bp, Glycine max; identical to SEQ ID NO: 8144
  CDS (1)..(462)

SEQ ID NO: 9172 - protein, 153 aa, Glycine max; identical to SEQ ID NO: 8145

SEQ ID NO: 9173 - DNA, 462 bp, Glycine max; identical to SEQ ID NO: 8146
  CDS (1)..(462)

SEQ ID NO: 9174 - protein, 153 aa, Glycine max; identical to SEQ ID NO: 8147

SEQ ID NO: 9175 - DNA, 474 bp, Glycine max; identical to SEQ ID NO: 8148
  CDS (1)..(474)

SEQ ID NO: 9176 - protein, 157 aa, Glycine max; identical to SEQ ID NO: 8149

SEQ ID NO: 9177 - DNA, 683 bp, Arabidopsis thaliana
  CDS (86)..(559)
aacaaggagcaaagagttcatagcaaagcaaagcttcaaaacagagtaaacgcaaagagtagcaatcacaagaggaagtgaaacgatgtctctaattccaagcatcttcggaggaagaagaacaaacgttttcgatccgttctcgctggatgttttcgatccgttcgaaggtttcttgacgccgtcaggattggcaaacgcacccgctaaggatgtggcagcgttcacaaacgctaaagtggattggagggagacacctgaggcgcacgtgttcaaggcggatttaccgggactgaggaaggaagaggtgaaagtggaggttgaggatggcaacatacttcagataagtggagagaggagcaatgagaatgaagagaagaatgacaagtggcaccgtgtggagcggtcgagtgggaagttcacgaggaggtttaggctgccggagaatgctaagatggaggaaatcaaagccagtatggaaaatggtgtgttgtcggttaccgtgcccaaggtgccagagaaaaagccagaggttaagtccattgatatctctggttaaagggaattgtttaagaccaaaaatgtgtgatggtagtgaaataattggtgtgtgatgtgtttttcttgtaatcatgaatctcgttgtatcattatcataaaatcttaataagagtgtgttttgt

SEQ ID NO: 9178 - protein, 157 aa, Arabidopsis thaliana
MSLIPSIFGGRRTNVFDPFSLDVFDPFEGFLTPSGLANAPAKDVAAFTNAKVDWRETPEAHVFKADLPGLRKEEVKVEVEDGNILQISGERSNENEEKNDKWHRVERSSGKFTRRFRLPENAKMEEIKASMENGVLSVTVPKVPEKKPEVKSIDISG

SEQ ID NO: 9179 - DNA, 459 bp, Zea mays; identical to SEQ ID NO: 8150
  CDS (1)..(459)

SEQ ID NO: 9180 - protein, 152 aa, Zea mays; identical to SEQ ID NO: 8151

SEQ ID NO: 9181 - DNA, 480 bp, Zea mays; identical to SEQ ID NO: 8152
  CDS (1)..(480)

SEQ ID NO: 9182 - protein, 159 aa, Zea mays; identical to SEQ ID NO: 8153

SEQ ID NO: 9183 - DNA, 477 bp, Zea mays; identical to SEQ ID NO: 8154
  CDS (1)..(477)

SEQ ID NO: 9184 - protein, 158 aa, Zea mays; identical to SEQ ID NO: 8155

SEQ ID NO: 9185 - DNA, 465 bp, Zea mays; identical to SEQ ID NO: 8156
  CDS (1)..(465)

SEQ ID NO: 9186 - protein, 154 aa, Zea mays; identical to SEQ ID NO: 8157

SEQ ID NO: 9187 - DNA, 465 bp, Zea mays; identical to SEQ ID NO: 8158
  CDS (1)..(465)

SEQ ID NO: 9188 - protein, 154 aa, Zea mays; identical to SEQ ID NO: 8159

SEQ ID NO: 9189 - DNA, 468 bp, Zea mays; identical to SEQ ID NO: 8160
  CDS (1)..(468)

SEQ ID NO: 9190 - protein, 155 aa, Zea mays; identical to SEQ ID NO: 8161

SEQ ID NO: 9191 - DNA, 474 bp, Zea mays; identical to SEQ ID NO: 8162
  CDS (1)..(474)

SEQ ID NO: 9192 - protein, 157 aa, Zea mays; identical to SEQ ID NO: 8163

SEQ ID NO: 9193 - DNA, 459 bp, Zea mays; identical to SEQ ID NO: 8164
  CDS (1)..(459)

SEQ ID NO: 9194 - protein, 152 aa, Zea mays; identical to SEQ ID NO: 8165

SEQ ID NO: 9195 - DNA, 489 bp, Zea mays; identical to SEQ ID NO: 8166
  CDS (1)..(489)

SEQ ID NO: 9196 - protein, 162 aa, Zea mays; identical to SEQ ID NO: 8167

SEQ ID NO: 9197 - DNA, 459 bp, Zea mays; identical to SEQ ID NO: 8168
  CDS (1)..(459)

SEQ ID NO: 9198 - protein, 152 aa, Zea mays; identical to SEQ ID NO: 8169

SEQ ID NO: 9199 - DNA, 459 bp, Zea mays; identical to SEQ ID NO: 8170
  CDS (1)..(459)

SEQ ID NO: 9200 - protein, 152 aa, Zea mays; identical to SEQ ID NO: 8171

SEQ ID NO: 9201 - DNA, 465 bp, Zea mays; identical to SEQ ID NO: 8172
  CDS (1)..(465)
  misc_feature (406)..(406): m is a or c

SEQ ID NO: 9202 - protein, 154 aa, Zea mays; identical to SEQ ID NO: 8173
  misc_feature (136)..(136): The Xaa at location 136 stands for Pro, or Thr.

SEQ ID NO: 9203 - DNA, 474 bp, Arabidopsis thaliana; identical to SEQ ID NO: 8090
  CDS (1)..(474)

SEQ ID NO: 9204 - protein, 157 aa, Arabidopsis thaliana; identical to SEQ ID NO: 8091

SEQ ID NO: 9205 - DNA, 474 bp, Arabidopsis thaliana; identical to SEQ ID NO: 8174
  CDS (1)..(474)

SEQ ID NO: 9206 - protein, 157 aa, Arabidopsis thaliana; identical to SEQ ID NO: 8175

SEQ ID NO: 9207 - DNA, 468 bp, Arabidopsis thaliana
  CDS (1)..(468)
atgtcgctgattccaagcttcttcggcaacaacaggcgaatcaacaacaacatattcgatccattctcactcgacgtatgggatccattcaaggaacttcaattcccgtcatcgtcttcgtcggcgatagcaaacgcacgtgtggattggaaagagacggcggaggcgcacgtgttcaaggcggatttaccggggatgaagaaagaagaggttaaagtagagattgaggatgatagtgtgcttaagatcagcggagagagacacgttgagaaagaggagaagcaggacacgtggcatcgtgtagagagatcgagtgggggattctcgaggaagtttaggttaccggagaatgtgaagatggatcaagttaaagcttcaatggagaatggtgttttgactgtgactgtgcctaaagtggagactaataagaagaaggctcaagttaagtctattgatatctctggctaa

SEQ ID NO: 9208 - protein, 155 aa, Arabidopsis thaliana
MSLIPSFFGNNRRINNNIFDPFSLDVWDPFKELQFPSSSSSAIANARVDWKETAEAHVFKADLPGMKKEEVKVEIEDDSVLKISGERHVEKEEKQDTWHRVERSSGGFSRKFRLPENVKMDQVKASMENGVLTVTVPKVETNKKKAQVKSIDISG

SEQ ID NO: 9209 - DNA, 462 bp, Arabidopsis thaliana; identical to SEQ ID NO: 8094
  CDS (1)..(462)

SEQ ID NO: 9210 - protein, 153 aa, Arabidopsis thaliana; identical to SEQ ID NO: 8177

SEQ ID NO: 9211 - DNA, 486 bp, Arabidopsis thaliana; identical to SEQ ID NO: 8180
  CDS (1)..(486)

SEQ ID NO: 9212 - protein, 161 aa, Arabidopsis thaliana; identical to SEQ ID NO: 8181

SEQ ID NO: 9213 - DNA, 444 bp, Thermotoga maritima MSB8
  CDS (1)..(444): transl_table=11
atgcttcttggaagaagagaagacatcttcaggccgttcagggaactccagagggagatcgacaggctcttcgatgacttcttcaggacggaggtcagacccgctaaggagttctttgcaccagacatggatgtgtacgaaacagacgatgaagtagtgatagaagtagaaatcccaggcatagacagaaaagacgtcaaaataacggttgaagagaacattttgaagatctctggtgaaaagaaactcgaaagagaacagaaaggtaaaaactattactacgttgagagaagcgctggaaaattcgaaagggcaatcagactcccagactacgttgacgtagaaaagatcaaagcagagtacaagaacggtgttctcacgataagggtaccaaagaaagaagaaaggaagaagaaagtgatcgaggtggaggttcaggagtaa

SEQ ID NO: 9214 - protein, 147 aa, Thermotoga maritima MSB8
MLLGRREDIFRPFRELQREIDRLFDDFFRTEVRPAKEFFAPDMDVYETDDEVVIEVEIPGIDRKDVKITVEENILKISGEKKLEREQKGKNYYYVERSAGKFERAIRLPDYVDVEKIKAEYKNGVLTIRVPKKEERKKKVIEVEVQE

SEQ ID NO: 9215 - DNA, 444 bp, Bdellovibrio bacteriovorus HD100
  CDS (1)..(444): transl_table=11
atgccaatgcgaagtttaagtccctggggcggtcgtcgtctgccgtcttcggatctcttcagtcagtttcaggattttatcaatgagttcgaccggggtgaatccagtgccctgactcgagcgggatttgatttctcgccctctgtggatgtggaagaaaaggacaatgcctatctggtcagtgcggacctgccgggtatgaagaaggatgaaatcaaagttgagcttaatgacaatatcctgacaatctctggagaacgcacccgcgagtcaaaatccgaaggtgggtattccgagcgatcctatggccgcttccagcgctctttcaccttgccagtgcaagtgaactccgaaaaaattgaggcgcattttgaggatggtgttttgcagatcacagtgcccaaagcagaaggtgcgcgcagtcatagtatcaagattatgtag

SEQ ID NO: 9216 - protein, 147 aa, Bdellovibrio bacteriovorus HD100
MPMRSLSPWGGRRLPSSDLFSQFQDFINEFDRGESSALTRAGFDFSPSVDVEEKDNAYLVSADLPGMKKDEIKVELNDNILTISGERTRESKSEGGYSERSYGRFQRSFTLPVQVNSEKIEAHFEDGVLQITVPKAEGARSHSIKIM

SEQ ID NO: 9217 - DNA, 555 bp, Neosartorya fischeri NRRL 181
  CDS (1)..(555)
atgtattctcgcaggcttttgaactttcctctgaaacacttcgctacgcgcactccaattgtccgctctccacggccgcgccagccatggcaggccaggacaatgtctttgatgcaaaggaaccaaaagaaccctggcgctggctttccctccttgtctcgagctcttaatgacctcgagtccttcctgaatcgcccagtgggcagccatgatgtactgggccactatcctcggtttgacgtccgcgagacaaaagacagctatcgtctcgacggagagcttccgggagtggacaagaaagacattgatattgaatggagcgacgacaacatcctcaccatcaaggggcgttcggagcgagagtcaacatcagaagatcccgaacaatcctggtggtgttctgagcgttcggtcggagagttcagacggtcgtttcggtttcccgagggtgttgaccgcgatgggatcgatgctagtttgaaggacggtgttctctcgattaccatcccgaaaacagcggaatcttctgtgagcaaacgtatcgacattaagtga

SEQ ID NO: 9218 - protein, 184 aa, Neosartorya fischeri NRRL 181
MYSRRLLNFPLKHFATRTPIVRSPRPRQPWQARTMSLMQRNQKNPGAGFPSLSRALNDLESFLNRPVGSHDVLGHYPRFDVRETKDSYRLDGELPGVDKKDIDIEWSDDNILTIKGRSERESTSEDPEQSWWCSERSVGEFRRSFRFPEGVDRDGIDASLKDGVLSITIPKTAESSVSKRIDIK

SEQ ID NO: 9219 - DNA, 468 bp, Physcomitrella patens subsp. patens; identical to SEQ ID NO: 8182
  CDS (1)..(468)

SEQ ID NO: 9220 - protein, 155 aa, Physcomitrella patens subsp. patens; identical to SEQ ID NO: 8183

SEQ ID NO: 9221 - DNA, 462 bp, Physcomitrella patens subsp. patens; identical to SEQ ID NO: 8184
  CDS (1)..(462)

SEQ ID NO: 9222 - protein, 153 aa, Physcomitrella patens subsp. patens; identical to SEQ ID NO: 8185

SEQ ID NO: 9223 - DNA, 462 bp, Physcomitrella patens subsp. patens; identical to SEQ ID NO: 8186
  CDS (1)..(462)

SEQ ID NO: 9224 - protein, 153 aa, Physcomitrella patens subsp. patens; identical to SEQ ID NO: 8187

SEQ ID NO: 9225 - DNA, 465 bp, Physcomitrella patens subsp. patens; identical to SEQ ID NO: 8188
  CDS (1)..(465)

SEQ ID NO: 9226 - protein, 154 aa, Physcomitrella patens subsp. patens; identical to SEQ ID NO: 8189

SEQ ID NO: 9227 - DNA, 471 bp, Physcomitrella patens subsp. patens; identical to SEQ ID NO: 8190
  CDS (1)..(471)

SEQ ID NO: 9228 - protein, 156 aa, Physcomitrella patens subsp. patens; identical to SEQ ID NO: 8191

SEQ ID NO: 9229 - DNA, 465 bp, Physcomitrella patens subsp. patens; identical to SEQ ID NO: 8192
  CDS (1)..(465)

SEQ ID NO: 9230 - protein, 154 aa, Physcomitrella patens subsp. patens; identical to SEQ ID NO: 8193

SEQ ID NO: 9231 - DNA, 480 bp, Vitis vinifera
  CDS (1)..(480)
atgagttcgttggggttgtggcggggaggagggtacgacccttggacgcccctgtcaccatcagatgcctgggacccttttgattttgggtttggggttgaaaagagctggggccgtggccctgatgacgatgtgtcggctctagctcatgctcacgtcgactggcgtgagaccgataacgctcacgtcttccgcgctgatcttcctggggtaaggagagaggagctgaaggtgcaagtggaggacaacaacatcctaaagatcagcggtgagaagaccaaggaaaaagaggaagtggacgaccaatggcaccgtgtggagaggcaaagaggcagtttcttgaggaggttcaggttgccggaaaatgcaatcacggacaggatcagttctgcgctaaaggatggagttttgaccgtcactgtgcctaagaaaactgagagtccaagcggcgtaaggacgatacatgtggcccaactctaa

SEQ ID NO: 9232 - protein, 159 aa, Vitis vinifera
MSSLGLWRGGGYDPWTPLSPSDAWDPFDFGFGVEKSWGRGPDDDVSALAHAHVDWRETDNAHVFRADLPGVRREELKVQVEDNNILKISGEKTKEKEEVDDQWHRVERQRGSFLRRFRLPENAITDRISSALKDGVLTVTVPKKTESPSGVRTIHVAQL

SEQ ID NO: 9233 - DNA, 492 bp, Vitis vinifera
  CDS (1)..(492)
atgcggggcggtaagaggatgacctcgctggtaccgtggcggggcggagggttggaccactggattggctcacccttttcttcagaattatgggaccctttagggtttgggtcgagggactggaggcgaggccgagacgacgatgtctcagccgttgctcttgcaagcgtggactggcgtgaaaccgataacgcacacaccattcgcgctgatcttcctggtgttcgaaaagaggacgtaaaggtgcaagtggaggacggcaacatacttcaaatcagcggtgagaagaccaaggagaaagaggagagcggggagcgatggcaccgcatagagaggcagagaggcagcttcttgaggaggttcaggttgccggaaaatgcaaacacggaggggatcaactgtgcgctggagaacggagtgttgactgtgacagtgcctaagaaagaggcgacgagtactggaagcgatgttaaacagatagatataggctag

SEQ ID NO: 9234 - protein, 163 aa, Vitis vinifera
MRGGKRMTSLVPWRGGGLDHWIGSPFSSELWDPLGFGSRDWRRGRDDDVSAVALASVDWRETDNAHTIRADLPGVRKEDVKVQVEDGNILQISGEKTKEKEESGERWHRIERQRGSFLRRFRLPENANTEGINCALENGVLTVTVPKKEATSTGSDVKQIDIG

SEQ ID NO: 9235 - DNA, 447 bp, Vitis vinifera; identical to SEQ ID NO: 8196
  CDS (1)..(447)

SEQ ID NO: 9236 - protein, 148 aa, Vitis vinifera; identical to SEQ ID NO: 8197

SEQ ID NO: 9237 - DNA, 480 bp, Vitis vinifera; identical to SEQ ID NO: 8198
  CDS (1)..(480)

SEQ ID NO: 9238 - protein, 159 aa, Vitis vinifera; identical to SEQ ID NO: 8199

SEQ ID NO: 9239 - DNA, 495 bp, Vitis vinifera; identical to SEQ ID NO: 8200
  CDS (1)..(495)

SEQ ID NO: 9240 - protein, 164 aa, Vitis vinifera; identical to SEQ ID NO: 8201

SEQ ID NO: 9241 - DNA, 483 bp, Vitis vinifera; identical to SEQ ID NO: 8202
  CDS (1)..(483)

SEQ ID NO: 9242 - protein, 160 aa, Vitis vinifera; identical to SEQ ID NO: 8203

SEQ ID NO: 9243 - DNA, 483 bp, Vitis vinifera; identical to SEQ ID NO: 8206
  CDS (1)..(483)

SEQ ID NO: 9244 - protein, 160 aa, Vitis vinifera; identical to SEQ ID NO: 8207

SEQ ID NO: 9245 - DNA, 456 bp, Vitis vinifera; identical to SEQ ID NO: 8208
  CDS (1)..(456)

SEQ ID NO: 9246 - protein, 151 aa, Vitis vinifera; identical to SEQ ID NO: 8209

SEQ ID NO: 9247 - DNA, 456 bp, Vitis vinifera; identical to SEQ ID NO: 8210
  CDS (1)..(456)

SEQ ID NO: 9248 - protein, 151 aa, Vitis vinifera; identical to SEQ ID NO: 8211

SEQ ID NO: 9249 - DNA, 456 bp, Vitis vinifera; identical to SEQ ID NO: 8212
  CDS (1)..(456)

SEQ ID NO: 9250 - protein, 151 aa, Vitis vinifera; identical to SEQ ID NO: 8213

SEQ ID NO: 9251 - DNA, 456 bp, Vitis vinifera; identical to SEQ ID NO: 8214
  CDS (1)..(456)

SEQ ID NO: 9252 - protein, 151 aa, Vitis vinifera; identical to SEQ ID NO: 8215

SEQ ID NO: 9253 - DNA, 456 bp, Vitis vinifera; identical to SEQ ID NO: 8216
  CDS (1)..(456)

SEQ ID NO: 9254 - protein, 151 aa, Vitis vinifera; identical to SEQ ID NO: 8217

SEQ ID NO: 9255 - DNA, 456 bp, Vitis vinifera; identical to SEQ ID NO: 8218
  CDS (1)..(456)

SEQ ID NO: 9256 - protein, 151 aa, Vitis vinifera; identical to SEQ ID NO: 8219

SEQ ID NO: 9257 - DNA, 435 bp, Vitis vinifera; identical to SEQ ID NO: 8220
  CDS (1)..(435)

SEQ ID NO: 9258 - protein, 144 aa, Vitis vinifera; identical to SEQ ID NO: 8221

SEQ ID NO: 9259 - DNA, 480 bp, Populus trichocarpa; identical to SEQ ID NO: 8222
  CDS (1)..(480)

SEQ ID NO: 9260 - protein, 159 aa, Populus trichocarpa; identical to SEQ ID NO: 8223

SEQ ID NO: 9261 - DNA, 453 bp, Populus trichocarpa; identical to SEQ ID NO: 8224
  CDS (1)..(453)

SEQ ID NO: 9262 - protein, 150 aa, Populus trichocarpa; identical to SEQ ID NO: 8225

SEQ ID NO: 9263 - DNA, 423 bp, Populus trichocarpa; identical to SEQ ID NO: 8226
  CDS (1)..(423)

SEQ ID NO: 9264 - protein, 140 aa, Populus trichocarpa; identical to SEQ ID NO: 8227

SEQ ID NO: 9265 - DNA, 462 bp, Populus trichocarpa; identical to SEQ ID NO: 8228
  CDS (1)..(462)

SEQ ID NO: 9266 - protein, 153 aa, Populus trichocarpa; identical to SEQ ID NO: 8229

SEQ ID NO: 9267 - DNA, 489 bp, Populus trichocarpa; identical to SEQ ID NO: 8230
  CDS (1)..(489)

SEQ ID NO: 9268 - protein, 162 aa, Populus trichocarpa; identical to SEQ ID NO: 8231

SEQ ID NO: 9269 - DNA, 480 bp, Populus trichocarpa; identical to SEQ ID NO: 8232
  CDS (1)..(480)

SEQ ID NO: 9270 - protein, 159 aa, Populus trichocarpa; identical to SEQ ID NO: 8233

SEQ ID NO: 9271 - DNA, 468 bp, Populus trichocarpa; identical to SEQ ID NO: 8234
  CDS (1)..(468)

SEQ ID NO: 9272 - protein, 155 aa, Populus trichocarpa; identical to SEQ ID NO: 8235

SEQ ID NO: 9273 - DNA, 471 bp, Populus trichocarpa; identical to SEQ ID NO: 8236
  CDS (1)..(471)

SEQ ID NO: 9274 - protein, 156 aa, Populus trichocarpa; identical to SEQ ID NO: 8237

SEQ ID NO: 9275 - DNA, 489 bp, Populus trichocarpa; identical to SEQ ID NO: 8238
  CDS (1)..(489)

SEQ ID NO: 9276 - protein, 162 aa, Populus trichocarpa; identical to SEQ ID NO: 8239

SEQ ID NO: 9277 - DNA, 453 bp, Populus trichocarpa; identical to SEQ ID NO: 8240
  CDS (1)..(453)

SEQ ID NO: 9278 - protein, 150 aa, Populus trichocarpa; identical to SEQ ID NO: 8241

SEQ ID NO: 9279 - DNA, 459 bp, Populus trichocarpa; identical to SEQ ID NO: 8242
  CDS (1)..(459)

SEQ ID NO: 9280 - protein, 152 aa, Populus trichocarpa; identical to SEQ ID NO: 8243

SEQ ID NO: 9281 - DNA, 459 bp, Populus trichocarpa; identical to SEQ ID NO: 8244
  CDS (1)..(459)

SEQ ID NO: 9282 - protein, 152 aa, Populus trichocarpa; identical to SEQ ID NO: 8245

SEQ ID NO: 9283 - DNA, 483 bp, Populus trichocarpa; identical to SEQ ID NO: 8246
  CDS (1)..(483)

SEQ ID NO: 9284 - protein, 160 aa, Populus trichocarpa; identical to SEQ ID NO: 8247

SEQ ID NO: 9285 - DNA, 477 bp, Populus trichocarpa; identical to SEQ ID NO: 8248
  CDS (1)..(477)

SEQ ID NO: 9286 - protein, 158 aa, Populus trichocarpa; identical to SEQ ID NO: 8249

SEQ ID NO: 9287 - DNA, 480 bp, Populus trichocarpa; identical to SEQ ID NO: 8250
  CDS (1)..(480)

SEQ ID NO: 9288 - protein, 159 aa, Populus trichocarpa; identical to SEQ ID NO: 8251

SEQ ID NO: 9289 - DNA, 489 bp, Populus trichocarpa; identical to SEQ ID NO: 8252
  CDS (1)..(489)

SEQ ID NO: 9290 - protein, 162 aa, Populus trichocarpa; identical to SEQ ID NO: 8253

SEQ ID NO: 9291 - DNA, 444 bp, Thermotoga petrophila RKU-1
  CDS (1)..(444): transl_table=11
atgctccttggaagaagagaagacatcttcaggccgttcagggaactccagagggagatcgacaggctcttcgatgacttcttcaggacggaggtcagacccgctaaggagttctttgcaccagacatggatgtgtacgaaacagacgatgaagtagtgatagaagtagaaatcccaggcatagacagaaaagacgtcaaaataacggttgaagagaatatcctgaagatctccggtgagaagaaggtcgaaagagaacagaaaggtaaaaactattactacgttgaaagaagcgctggaaaattcgaaagggcaatcagactcccagactacgtcgacgcagaaaagatcaaagcagagtacaagaacggagttctcacgataagggtgccaaagaaagaggagaggaagaggaaagtaatcgaggtggaagttcaggagtaa

SEQ ID NO: 9292 - protein, 147 aa, Thermotoga petrophila RKU-1
MLLGRREDIFRPFRELQREIDRLFDDFFRTEVRPAKEFFAPDMDVYETDDEVVIEVEIPGIDRKDVKITVEENILKISGEKKVEREQKGKNYYYVERSAGKFERAIRLPDYVDAEKIKAEYKNGVLTIRVPKKEERKRKVIEVEVQE

SEQ ID NO: 9293 - DNA, 405 bp, Chlorobium limicola DSM 245
  CDS (1)..(405): transl_table=11
atgcttgtcaaattagcaaaggatcccatgagacttttcgacgatatctggtcaggaacgcagatgccatctacaaatgccccggcattcaaggttgatatttctgaagacgagactgcttttcacatcgatgccgaacttccggggcttgaaaaagaacagatcgcgctgaacatcgaagacgatgtacttaccatcaaggctgagcgcaaacaggaatcggaagaaaagaaaaaagattaccaccggattgaacgatcatacggaagtttttcacgaagcttcaatctgggagagatgatcgatcaggataatatcggagctgattttgaaaacggggtactccacgttaccctgccgaaagcggcgccggtgaaaaaaacaaaggaaatctccatcagataa

SEQ ID NO: 9294 - protein, 134 aa, Chlorobium limicola DSM 245
MLVKLAKDPMRLFDDIWSGTQMPSTNAPAFKVDISEDETAFHIDAELPGLEKEQIALNIEDDVLTIKAERKQESEEKKKDYHRIERSYGSFSRSFNLGEMIDQDNIGADFENGVLHVTLPKAAPVKKTKEISIR

SEQ ID NO: 9295 - DNA, 429 bp, Thermosipho africanus TCF52B
  CDS (1)..(429): transl_table=11
atgttagcaagaagaaattactttgatccatttgtagaacttcaaagagagattgacagattatttgaagactttgtaagaccatcaaggtttgataccactcacttcccaaaagtagatgtttatgaaacggataaagaagttgtcattgaagctgaacttccaggtcttaaaaaagatgacgttaaaataacaattgaagataacgttcttacaataaaaggagaaagaaaattcaatcgcgaggataaaggaaagaactacaaaataattgaaagggcagaaggatacttcgaaaggtcatttggacttccagaatatgttgacgtagaaaaaattaaagcaaaattcaatgatggggtattgacaattgaacttccaaagaaagaaacaaaagacaaaaaagttattgatatacaagttgaataa

SEQ ID NO: 9296 - protein, 142 aa, Thermosipho africanus TCF52B
MLARRNYFDPFVELQREIDRLFEDFVRPSRFDTTHFPKVDVYETDKEVVIEAELPGLKKDDVKITIEDNVLTIKGERKFNREDKGKNYKIIERAEGYFERSFGLPEYVDVEKIKAKFNDGVLTIELPKKETKDKKVIDIQVE

SEQ ID NO: 9297 - DNA, 444 bp, Thermotoga neapolitana DSM 4359
  CDS (1)..(444): transl_table=11
atgcttcttggaagaagggaagacatcttcagaccgttcagggaacttcagagggagatcgacagactcttcgatgaattcttcaagactgaaatcagaccatccagggaagtcttcgcaccggacatggacgtgtacgaaacagacgacgaagtagtggtggaagtggaagtaccaggtcttgacagaaaagacatcaaaataacggttgaagaaaacattttgaagatctctggagaaaagaagatcgaaagagaacagaaaggtaggaactactacttcgtcgaaagaagtgcgggtaagttcgaaagggccataagacttccagactacgtagatgtggaaaagatcaaagcagagtacaagaacggagtcctcacagtcagaataccgaagaaagaggaaaggaagaagaaagtgatcgaggtggaggttcaggagtaa

SEQ ID NO: 9298 - protein, 147 aa, Thermotoga neapolitana DSM 4359
MLLGRREDIFRPFRELQREIDRLFDEFFKTEIRPSREVFAPDMDVYETDDEVVVEVEVPGLDRKDIKITVEENILKISGEKKIEREQKGRNYYFVERSAGKFERAIRLPDYVDVEKIKAEYKNGVLTVRIPKKEERKKKVIEVEVQE

SEQ ID NO: 9299 - DNA, 471 bp, Desulfotalea psychrophila LSv54; identical to SEQ ID NO: 8256
  CDS (1)..(471): transl_table=11

SEQ ID NO: 9300 - protein, 156 aa, Desulfotalea psychrophila LSv54; identical to SEQ ID NO: 8257

SEQ ID NO: 9301 - DNA, 432 bp, Oceanobacter sp. RED65
  CDS (1)..(432): transl_table=11
atgaaattaacaacttgggatccgttccgtgaaatggaagctgttttagatcgctaccgccctgcccgcggcgtggcctctaatgaagaaataacacgcagtgattggtatccaagcgtggatgtttcggaaaccgatgcggcgttccacattcacgctgaattacccggtgtgaagaaagacgatattaaagtaacggttcatgatggcattttgaccttgagtggtcagcgcgaaaatgttcatgagcagaaggataaaaaggtacatcgcgtagagcgcagttttggttctttccgccgcagctttaccttgccagataatgtgcaaggggaagatgttcaggcgaacttccaagacggtgtacttgaagtggatatacctaaagtggaaaaacaaaaaccgaaacaagtggaagtccaagtgaagtaa

SEQ ID NO: 9302 - protein, 143 aa, Oceanobacter sp. RED65
MKLTTWDPFREMEAVLDRYRPARGVASNEEITRSDWYPSVDVSETDAAFHIHAELPGVKKDDIKVTVHDGILTLSGQRENVHEQKDKKVHRVERSFGSFRRSFTLPDNVQGEDVQANFQDGVLEVDIPKVEKQKPKQVEVQVK

SEQ ID NO: 9303 - DNA, 510 bp, Stigmatella aurantiaca DW4/3-1; identical to SEQ ID NO: 8262
  CDS (1)..(510): transl_table=11

SEQ ID NO: 9304 - protein, 169 aa, Stigmatella aurantiaca DW4/3-1; identical to SEQ ID NO: 8263

SEQ ID NO: 9305 - DNA, 534 bp, Planctomyces maris DSM 8797
  CDS (1)..(534): transl_table=11
atggcaactacagtgtcatcagaaaaaaagaaaccagaacaatccactaagaatgaagtaaagaccaggccgctgtcacgtttttcgcaggatttgtcatcttttatggggcgggcgccgtttttatcgttccggaatgagatggataacctgttgaatcgtttttcagacgattttggcaacggatggctgacacaggggtatactgcgaatctcgatttgtctgaaacgaacaaccacattgaaatcagaatggatgttcccggaatccaacctgaagaaattgacgtggaagtatccggcaatctcctgcgaatcacgggagaacgtaaggaagagcatgaggaaaagggaaagatgtttcatcgtatggaacgtcgtacaggcagtttttcccgctcagtcacgttgccttgcgatgtagaagaagatcaggtcgaagcaaattgtgaaaatggtgttctgacaatcacactaccgaagtgtgaatcaatgaagccacataaaattaatgtaaaacctgtcgcaaaataa

SEQ ID NO: 9306 - protein, 177 aa, Planctomyces maris DSM 8797
MATTVSSEKKKPEQSTKNEVKTRPLSRFSQDLSSFMGRAPFLSFRNEMDNLLNRFSDDFGNGWLTQGYTANLDLSETNNHIEIRMDVPGIQPEEIDVEVSGNLLRITGERKEEHEEKGKMFHRMERRTGSFSRSVTLPCDVEEDQVEANCENGVLTITLPKCESMKPHKINVKPVAK

SEQ ID NO: 9307 - DNA, 429 bp, Caminibacter mediatlanticus TB-2
  CDS (1)..(429): transl_table=11
atgtggccaatggtatttgacccatttagagaattacaagatatagaaagaagaattggagcagtattaagcgctaataaaccaacagcacctgtaaaagttgaaagttttacaccagcagttaatgaaagagttgatgaaaagggttattatttagaaattgacttaccaggagttaaaaaagaagatattgatatttcagtaaatgatggtgttttagtaatttcaggagagagaaaacttgaaaaaaaagaagaaaagccaaattatacaagaattgaaagtttctttggaagatttgagagagcatttaaattgccagcagatgctgatttagataatatagaagcaaaatatgaagatggagttttaaaagtatttattcctaaaaaacaaaaaccagcaggtaaaaaaatagaggttaaataa

SEQ ID NO: 9308 - protein, 142 aa, Caminibacter mediatlanticus TB-2
MWPMVFDPFRELQDIERRIGAVLSANKPTAPVKVESFTPAVNERVDEKGYYLEIDLPGVKKEDIDISVNDGVLVISGERKLEKKEEKPNYTRIESFFGRFERAFKLPADADLDNIEAKYEDGVLKVFIPKKQKPAGKKIEVK

SEQ ID NO: 9309 - DNA, 462 bp, Ruminococcus torques ATCC 27756
  CDS (1)..(462): transl_table=11
atgttgatgcctagtatttttggagagaatttgtttgacgatgattggatggatttcccgtttgagagatttgacagagatttctggggaaagaaaaatccgctgtatggtaagaatgccaaaaacatgatgaagacagatattcgtgagcatgaagcgggatatgagttggatattgatcttccgggatttaaaaaggacgagattaccgtggatcttgaaaatggttatctgaccatctcggcggcgaaaggacttgacaaggacgaggaagataagaagggaaaatacattcggaaagagcgttatgcaggtacaatgcagaggagtttttatgtaggcgatgcgatcactcacgaagatattaaagcaaaatttgaaaacggtattttgagcctgacaattccgaaaaaggatgcgaaagcagtagagactaagaaatccattgcgattgaaggataa

SEQ ID NO: 9310 - protein, 153 aa, Ruminococcus torques ATCC 27756
MLMPSIFGENLFDDDWMDFPFERFDRDFWGKKNPLYGKNAKNMMKTDIREHEAGYELDIDLPGFKKDEITVDLENGYLTISAAKGLDKDEEDKKGKYIRKERYAGTMQRSFYVGDAITHEDIKAKFENGILSLTIPKKDAKAVETKKSIAIEG

SEQ ID NO: 9311 - DNA, 459 bp, Ralstonia pickettii 12D
  CDS (1)..(459): transl_table=11
atgtctgcattgactccgtgggaccccttccgggaactggatgaattgcaaaaccgcctggcgacgatgttgggacggacaccccagcgagagggcgcccgtaccggcaacgaagccatgaccacggcggactgggcaccaatggtggacatcagcgaggatgagaacgcattcctcctcaagctggatctgccggaggtccccaaggatgccgtgcgcgtcagcgcggaaaacggcgtgctcaccatcagcggcgagcgcaaactggaaaaagaggagcagggcaagaagttccaccgcatcgaacgtgcgtatggccgctttgtgcgcagctttgtcttgcctgacaacgttgatccgaccaaggtgacggcttcgatgaaagacggcgcgctggaagtgcggcttgtcaaggccgagcaagccaaaccgaaacagattgaaatctcagtcaactaa

SEQ ID NO: 9312 - protein, 152 aa, Ralstonia pickettii 12D
MSALTPWDPFRELDELQNRLATMLGRTPQREGARTGNEAMTTADWAPMVDISEDENAFLLKLDLPEVPKDAVRVSAENGVLTISGERKLEKEEQGKKFHRIERAYGRFVRSFVLPDNVDPTKVTASMKDGALEVRLVKAEQAKPKQIEISVN

SEQ ID NO: 9313 - DNA, 441 bp, Clostridium sp. L2-50
  CDS (1)..(441): transl_table=11
atgttgatgcctagtatttttggagaaaatttatttgatgatttatttgatgattttgcacgtccttataaagtgacaacaggttatacacagcctgctaatattatgaagacagatgtaaaagagaccgaaggttcatttgaactggatattgatatgcctggttacaagaaagaagatgtaaaggcagaattgaaggatggttatctgaccatcacaggtacaacgaagaaagaaacaggcgatcaggacaagaaaggcaaatatgtccgccgtgaaagatattgtggttcttgcagccgtagcttctatgttggtaaggcagttgaaaaggaagacatcaaggcaaaatttgaagatggtgttttaaagatcagcgtaccaaagaaagaagagaagccaaaggttgaagaaagtaaatatatttcaatcgaaggataa

SEQ ID NO: 9314 - protein, 146 aa, Clostridium sp. L2-50
MLMPSIFGENLFDDLFDDFARPYKVTTGYTQPANIMKTDVKETEGSFELDIDMPGYKKEDVKAELKDGYLTITGTTKKETGDQDKKGKYVRRERYCGSCSRSFYVGKAVEKEDIKAKFEDGVLKISVPKKEEKPKVEESKYISIEG

SEQ ID NO: 9315 - DNA, 435 bp, Eubacterium dolichum DSM 3991
  CDS (1)..(435): transl_table=11
atggaggcgatggatatgaaattcttcccaagaacaagcaatgtatttgacgatgtatttgatgacatgtttacttcaccattcttctcaaaccgcaatgatatggcaatgaaaaccgatatcagtgaaaaagacggatattatttattggatatggaattgcccggttgtcgtaaagaggatattcaaattgagcttcatgacggatatttgaatatcagtgctgcacataacacaaacaaggaagaaaaggacgataaaggaaacatcattcgtcaggaacgttacagtggcaacttctcacgtagcttctatgtcggtgaaaatcttgatgaaacagatatcaaggcaagttatgataatggggaattaaaggttactttccctaaggaaaccgtaaaaataccggaaaagaaaacgattatgattgaataa

SEQ ID NO: 9316 - protein, 144 aa, Eubacterium dolichum DSM 3991
MEAMDMKFFPRTSNVFDDVFDDMFTSPFFSNRNDMAMKTDISEKDGYYLLDMELPGCRKEDIQIELHDGYLNISAAHNTNKEEKDDKGNIIRQERYSGNFSRSFYVGENLDETDIKASYDNGELKVTFPKETVKIPEKKTIMIE

SEQ ID NO: 9317 - DNA, 465 bp, Rosa chinensis; identical to SEQ ID NO: 8270
  CDS (1)..(465)

SEQ ID NO: 9318 - protein, 154 aa, Rosa chinensis; identical to SEQ ID NO: 8271

SEQ ID NO: 9319 - DNA, 474 bp, Ageratina adenophora; identical to SEQ ID NO: 8272
  CDS (1)..(474)

SEQ ID NO: 9320 - protein, 157 aa, Ageratina adenophora; identical to SEQ ID NO: 8273

SEQ ID NO: 9321 - DNA, 450 bp, Oryza sativa subsp. indica; identical to SEQ ID NO: 8274
  CDS (1)..(450)

SEQ ID NO: 9322 - protein, 149 aa, Oryza sativa subsp. indica; identical to SEQ ID NO: 8275

SEQ ID NO: 9323 - DNA, 465 bp, Oryza sativa subsp. indica; identical to SEQ ID NO: 8276
  CDS (1)..(465)

SEQ ID NO: 9324 - protein, 154 aa, Oryza sativa subsp. indica; identical to SEQ ID NO: 8277

SEQ ID NO: 9325 - DNA, 483 bp, Oryza sativa subsp. indica; identical to SEQ ID NO: 8278
  CDS (1)..(483)

SEQ ID NO: 9326 - protein, 160 aa, Oryza sativa subsp. indica; identical to SEQ ID NO: 8279

SEQ ID NO: 9327 - DNA, 480 bp, Oryza sativa subsp. indica; identical to SEQ ID NO: 8280
  CDS (1)..(480)

SEQ ID NO: 9328 - protein, 159 aa, Oryza sativa subsp. indica; identical to SEQ ID NO: 8281

SEQ ID NO: 9329 - DNA, 486 bp, Oryza sativa subsp. japonica; identical to SEQ ID NO: 8282
  CDS (1)..(486)

SEQ ID NO: 9330 - protein, 161 aa, Oryza sativa subsp. japonica; identical to SEQ ID NO: 8283

SEQ ID NO: 9331 - DNA, 459 bp, Leptospirillum sp. Group II UBA
  CDS (1)..(459): transl_table=11
atgacaagccttttgagatgggatcccgtcagggaactggaagacctgggacgccgactgactcccgtatttgcacggcttccccaggagacaagaacggacgagcggcaggcgatgactgccgtggactgggctcccgtagtggatattgccgaagatggagaagcctatcatgtgacagtggaattgcccgagatccgcaaagaggatgtcaaggtttccattgaaaacgggattctggccatttcgggggagcgcaaaaagatctcggaagagaagaacgggaaaagataccaccgtatggaacgtctttacgggagtttcctccgcagtttctctcttccggatgacgccgatcctcaacgggtcacggcaacaatgaaggacggcgtattgcacgtcaagatcgaaaaactggccgaaacgaagccaaggtcagtcgagatcgaggtcggttaa

SEQ ID NO: 9332 - protein, 152 aa, Leptospirillum sp. Group II UBA
MTSLLRWDPVRELEDLGRRLTPVFARLPQETRTDERQAMTAVDWAPVVDIAEDGEAYHVTVELPEIRKEDVKVSIENGILAISGERKKISEEKNGKRYHRMERLYGSFLRSFSLPDDADPQRVTATMKDGVLHVKIEKLAETKPRSVEIEVG

SEQ ID NO: 9333 - DNA, 507 bp, Nelumbo nucifera
  CDS (1)..(507)
atgtcggttttcctttctttcctggatcggcggttcaacatatttgatcttgatcccctccaggccttcttctggggaacaaccggaacgtcggaattggccaacacccagatcgattggaaggaaaccccacatgcccacgtcttcgaaatcgatcttccgggtcttaccaaagatgatgttaagctggaaattcatgaaggaagggtccttcagatcagtggggagaggaaagaggaaccagcagagactagagaggagaaaggtgaacagtggcattgcctggagaggacgcgtgggaagtttatgaggcaattccggctgccggagaatgccaaggttgatgacataaaggctaccatggcaaatggagtgctcactgtcacagtgcctaaagaagcagaaactaagaagcagcccaaacacaaactcgtagagatttctggtggtgatggacgcccctccaactccaagggacttggccgttttgtttgttgcgtagcttaa

SEQ ID NO: 9334 - protein, 168 aa, Nelumbo nucifera
MSVFLSFLDRRFNIFDLDPLQAFFWGTTGTSELANTQIDWKETPHAHVFEIDLPGLTKDDVKLEIHEGRVLQISGERKEEPAETREEKGEQWHCLERTRGKFMRQFRLPENAKVDDIKATMANGVLTVTVPKEAETKKQPKHKLVEISGGDGRPSNSKGLGRFVCCVA

SEQ ID NO: 9335 - DNA, 489 bp, Agave tequilana; identical to SEQ ID NO: 8284
  CDS (1)..(489)

SEQ ID NO: 9336 - protein, 162 aa, Agave tequilana; identical to SEQ ID NO: 8285

SEQ ID NO: 9337 - DNA, 462 bp, Agave tequilana; identical to SEQ ID NO: 8286
  CDS (1)..(462)

SEQ ID NO: 9338 - protein, 153 aa, Agave tequilana; identical to SEQ ID NO: 8287

SEQ ID NO: 9339 - DNA, 486 bp, Agave tequilana; identical to SEQ ID NO: 8288
  CDS (1)..(486)

SEQ ID NO: 9340 - protein, 161 aa, Agave tequilana; identical to SEQ ID NO: 8289

SEQ ID NO: 9341 - DNA, 489 bp, Agave tequilana; identical to SEQ ID NO: 8290
  CDS (1)..(489)

SEQ ID NO: 9342 - protein, 162 aa, Agave tequilana; identical to SEQ ID NO: 8291

SEQ ID NO: 9343 - DNA, 480 bp, Agave tequilana; identical to SEQ ID NO: 8292
  CDS (1)..(480)

SEQ ID NO: 9344 - protein, 159 aa, Agave tequilana; identical to SEQ ID NO: 8293

SEQ ID NO: 9345 - DNA, 486 bp, Agave tequilana; identical to SEQ ID NO: 8294
  CDS (1)..(486)

SEQ ID NO: 9346 - protein, 161 aa, Agave tequilana; identical to SEQ ID NO: 8295

SEQ ID NO: 9347 - DNA, 486 bp, Agave tequilana; identical to SEQ ID NO: 8296
  CDS (1)..(486)

SEQ ID NO: 9348 - protein, 161 aa, Agave tequilana; identical to SEQ ID NO: 8297

SEQ ID NO: 9349 - DNA, 486 bp, Agave tequilana; identical to SEQ ID NO: 8298
  CDS (1)..(486)

SEQ ID NO: 9350 - protein, 161 aa, Agave tequilana; identical to SEQ ID NO: 8299

SEQ ID NO: 9351 - DNA, 486 bp, Agave tequilana; identical to SEQ ID NO: 8300
  CDS (1)..(486)

SEQ ID NO: 9352 - protein, 161 aa, Agave tequilana; identical to SEQ ID NO: 8301

SEQ ID NO: 9353 - DNA, 483 bp, Vitis vinifera; identical to SEQ ID NO: 8302
  CDS (1)..(483)
  misc_feature (9)..(9): w is a or t
  misc_feature (28)..(28): r is g or a

SEQ ID NO: 9354 - protein, 160 aa, Vitis vinifera; identical to SEQ ID NO: 8303
  misc_feature (10)..(10): The Xaa at location 10 stands for Gly, or Ser.

SEQ ID NO: 9355 - DNA, 483 bp, Vitis vinifera; identical to SEQ ID NO: 8304
  CDS (1)..(483)

SEQ ID NO: 9356 - protein, 160 aa, Vitis vinifera; identical to SEQ ID NO: 8305

SEQ ID NO: 9357 - DNA, 480 bp, Vitis vinifera; identical to SEQ ID NO: 8306
  CDS (1)..(480)

SEQ ID NO: 9358 - protein, 159 aa, Vitis vinifera; identical to SEQ ID NO: 8307

SEQ ID NO: 9359 - DNA, 483 bp, Vitis vinifera; identical to SEQ ID NO: 8308
  CDS (1)..(483)
  misc_feature (72)..(72): m is a or c
  misc_feature (189)..(189): y is t or c
  misc_feature (287)..(287): m is a or c
  misc_feature (288)..(288): r is g or a
  misc_feature (289)..(289): r is g or a
  misc_feature (412)..(412): k is g or t
  misc_feature (476)..(476): w is a or t

SEQ ID NO: 9360 - protein, 160 aa, Vitis vinifera; identical to SEQ ID NO: 8309
  misc_feature (96)..(96): The Xaa at location 96 stands for Lys, or Thr.
  misc_feature (97)..(97): The Xaa at location 97 stands for Glu, or Lys.
  misc_feature (138)..(138): The Xaa at location 138 stands for Leu, or Val.
  misc_feature (159)..(159): The Xaa at location 159 stands for Phe, or Tyr.

SEQ ID NO: 9361 - DNA, 483 bp, Vitis vinifera; identical to SEQ ID NO: 8310
  CDS (1)..(483)
  misc_feature (375)..(375): k is g or t
  misc_feature (393)..(393): r is g or a
  misc_feature (396)..(396): w is a or t
  misc_feature (427)..(427): r is g or a

SEQ ID NO: 9362 - protein, 160 aa, Vitis vinifera; identical to SEQ ID NO: 8311
  misc_feature (143)..(143): The Xaa at location 143 stands for Ile, or Val.

SEQ ID NO: 9363 - DNA, 483 bp, Vitis vinifera; identical to SEQ ID NO: 8312
  CDS (1)..(483)
  misc_feature (9)..(9): s is g or c

SEQ ID NO: 9364 - protein, 160 aa, Vitis vinifera; identical to SEQ ID NO: 8313

SEQ ID NO: 9365 - DNA, 474 bp, Ageratina adenophora; identical to SEQ ID NO: 8314
  CDS (1)..(474)

SEQ ID NO: 9366 - protein, 157 aa, Ageratina adenophora; identical to SEQ ID NO: 8315

SEQ ID NO: 9367 - DNA, 450 bp, Viola baoshanensis
  CDS (1)..(450)
  misc_feature (85)..(85): y is t or c
atgttgcggtacccctaccgcgatatccacttcagcagtgcggtggctccgccgcaccacggctacccaccaccgtattcttggyccgaacccgccgcggccatcgccgagccagcacctcttacaaccgggaagatctacatgaaggagacggcggaggcgcacgtgatcaagatggaagtgccgggcctgaagagggaggaggtgaaggtggagttggaggaaggtaacacggttaagatttgtggggagaaaatcgtggagagggaagagaggaacggttattggtaccgcgtggagaggagtggaggcaggtttgttagatccattaggctgcccgagaatgcaaacgggcaggaaatgaaggcctgtctggataatggggtgctttttattactgtccctaaatgcgaaatgaagaaaacccgcaaatccatcagtgttttctga

SEQ ID NO: 9368 - protein, 149 aa, Viola baoshanensis
  misc_feature (29)..(29): The Xaa at location 29 stands for Pro, or Ser.
MLRYPYRDIHFSSAVAPPHHGYPPPYSWXEPAAAIAEPAPLTTGKIYMKETAEAHVIKMEVPGLKREEVKVELEEGNTVKICGEKIVEREERNGYWYRVERSGGRFVRSIRLPENANGQEMKACLDNGVLFITVPKCEMKKTRKSISVF

SEQ ID NO: 9369 - DNA, 462 bp, Vitis vinifera; identical to SEQ ID NO: 8316
  CDS (1)..(462)

SEQ ID NO: 9370 - protein, 153 aa, Vitis vinifera; identical to SEQ ID NO: 8317

SEQ ID NO: 9371 - DNA, 435 bp, Vitis vinifera; identical to SEQ ID NO: 8318
  CDS (1)..(435)

SEQ ID NO: 9372 - protein, 144 aa, Vitis vinifera; identical to SEQ ID NO: 8319

SEQ ID NO: 9373 - DNA, 405 bp, Vitis vinifera; identical to SEQ ID NO: 8320
  CDS (1)..(405)

SEQ ID NO: 9374 - protein, 134 aa, Vitis vinifera; identical to SEQ ID NO: 8321

SEQ ID NO: 9375 - DNA, 477 bp, Gossypium hirsutum; identical to SEQ ID NO: 8322
  CDS (1)..(477)

SEQ ID NO: 9376 - protein, 158 aa, Gossypium hirsutum; identical to SEQ ID NO: 8323

SEQ ID NO: 9377 - DNA, 462 bp, Gossypium hirsutum; identical to SEQ ID NO: 8324
  CDS (1)..(462)

SEQ ID NO: 9378 - protein, 153 aa, Gossypium hirsutum; identical to SEQ ID NO: 8325

SEQ ID NO: 9379 - DNA, 465 bp, Gossypium hirsutum; identical to SEQ ID NO: 8326
  CDS (1)..(465)

SEQ ID NO: 9380 - protein, 154 aa, Gossypium hirsutum; identical to SEQ ID NO: 8327

SEQ ID NO: 9381 - DNA, 480 bp, Gossypium hirsutum; identical to SEQ ID NO: 8328
  CDS (1)..(480)

SEQ ID NO: 9382 - protein, 159 aa, Gossypium hirsutum; identical to SEQ ID NO: 8329

SEQ ID NO: 9383 - DNA, 456 bp, Picea sitchensis; identical to SEQ ID NO: 8330
  CDS (1)..(456)

SEQ ID NO: 9384 - protein, 151 aa, Picea sitchensis; identical to SEQ ID NO: 8331

SEQ ID NO: 9385 - DNA, 456 bp, Picea sitchensis; identical to SEQ ID NO: 8332
  CDS (1)..(456)

SEQ ID NO: 9386 - protein, 151 aa, Picea sitchensis; identical to SEQ ID NO: 8333

SEQ ID NO: 9387 - DNA, 483 bp, Picea sitchensis; identical to SEQ ID NO: 8336
  CDS (1)..(483)

SEQ ID NO: 9388 - protein, 160 aa, Picea sitchensis; identical to SEQ ID NO: 8337

SEQ ID NO: 9389 - DNA, 477 bp, Picea sitchensis; identical to SEQ ID NO: 8338
  CDS (1)..(477)

SEQ ID NO: 9390 - protein, 158 aa, Picea sitchensis; identical to SEQ ID NO: 8339

SEQ ID NO: 9391 - DNA, 483 bp, Picea sitchensis; identical to SEQ ID NO: 8340
  CDS (1)..(483)

SEQ ID NO: 9392 - protein, 160 aa, Picea sitchensis; identical to SEQ ID NO: 8341

SEQ ID NO: 9393 - DNA, 477 bp, Picea sitchensis; identical to SEQ ID NO: 8342
  CDS (1)..(477)

SEQ ID NO: 9394 - protein, 158 aa, Picea sitchensis; identical to SEQ ID NO: 8343

SEQ ID NO: 9395 - DNA, 477 bp, Picea sitchensis; identical to SEQ ID NO: 8344
  CDS (1)..(477)

SEQ ID NO: 9396 - protein, 158 aa, Picea sitchensis; identical to SEQ ID NO: 8345

SEQ ID NO: 9397 - DNA, 477 bp, Picea sitchensis; identical to SEQ ID NO: 8346
  CDS (1)..(477)

SEQ ID NO: 9398 - protein, 158 aa, Picea sitchensis; identical to SEQ ID NO: 8347

SEQ ID NO: 9399 - DNA, 483 bp, Picea sitchensis; identical to SEQ ID NO: 8348
  CDS (1)..(483)

SEQ ID NO: 9400 - protein, 160 aa, Picea sitchensis; identical to SEQ ID NO: 8349

SEQ ID NO: 9401 - DNA, 483 bp, Picea sitchensis; identical to SEQ ID NO: 8350
  CDS (1)..(483)

SEQ ID NO: 9402 - protein, 160 aa, Picea sitchensis; identical to SEQ ID NO: 8351

SEQ ID NO: 9403 - DNA, 483 bp, Picea sitchensis; identical to SEQ ID NO: 8352
  CDS (1)..(483)

SEQ ID NO: 9404 - protein, 160 aa, Picea sitchensis; identical to SEQ ID NO: 8353

SEQ ID NO: 9405 - DNA, 468 bp, Ageratina adenophora; identical to SEQ ID NO: 8354
  CDS (1)..(468)

SEQ ID NO: 9406 - protein, 155 aa, Ageratina adenophora; identical to SEQ ID NO: 8355

SEQ ID NO: 9407 - DNA, 471 bp, Rosa hybrid cultivar; identical to SEQ ID NO: 8356
  CDS (1)..(471)

SEQ ID NO: 9408 - protein, 156 aa, Rosa hybrid cultivar; identical to SEQ ID NO: 8357

SEQ ID NO: 9409 - DNA, 477 bp, Oryza sativa subsp. japonica; identical to SEQ ID NO: 8358
  CDS (1)..(477)

SEQ ID NO: 9410 - protein, 158 aa, Oryza sativa subsp. japonica; identical to SEQ ID NO: 8359

SEQ ID NO: 9411 - DNA, 462 bp, Cleome spinosa; identical to SEQ ID NO: 8360
  CDS (1)..(462)

SEQ ID NO: 9412 - protein, 153 aa, Cleome spinosa; identical to SEQ ID NO: 8361

SEQ ID NO: 9413 - DNA, 492 bp, Capsella rubella; identical to SEQ ID NO: 8362
  CDS (1)..(492)

SEQ ID NO: 9414 - protein, 163 aa, Capsella rubella; identical to SEQ ID NO: 8363

SEQ ID NO: 9415 - DNA, 444 bp, Aegilops longissima; identical to SEQ ID NO: 8364
  CDS (1)..(444)

SEQ ID NO: 9416 - protein, 147 aa, Aegilops longissima; identical to SEQ ID NO: 8365

SEQ ID NO: 9417 - DNA, 456 bp, Aegilops longissima; identical to SEQ ID NO: 8366
  CDS (1)..(456)

SEQ ID NO: 9418 - protein, 151 aa, Aegilops longissima; identical to SEQ ID NO: 8367

SEQ ID NO: 9419 - DNA, 456 bp, Aegilops longissima; identical to SEQ ID NO: 8368
  CDS (1)..(456)

SEQ ID NO: 9420 - protein, 151 aa, Aegilops longissima; identical to SEQ ID NO: 8369

SEQ ID NO: 9421 - DNA, 456 bp, Aegilops peregrina; identical to SEQ ID NO: 8370
  CDS (1)..(456)

SEQ ID NO: 9422 - protein, 151 aa, Aegilops peregrina; identical to SEQ ID NO: 8371

SEQ ID NO: 9423 - DNA, 456 bp, Aegilops kotschyi; identical to SEQ ID NO: 8372
  CDS (1)..(456)

SEQ ID NO: 9424 - protein, 151 aa, Aegilops kotschyi; identical to SEQ ID NO: 8373

SEQ ID NO: 9425 - DNA, 456 bp, Aegilops kotschyi; identical to SEQ ID NO: 8374
  CDS (1)..(456)

SEQ ID NO: 9426 - protein, 151 aa, Aegilops kotschyi; identical to SEQ ID NO: 8375

SEQ ID NO: 9427 - DNA, 456 bp, Triticum turgidum subsp. dicoccoides; identical to SEQ ID NO: 8376
  CDS (1)..(456)

SEQ ID NO: 9428 - protein, 151 aa, Triticum turgidum subsp. dicoccoides; identical to SEQ ID NO: 8377

SEQ ID NO: 9429 - DNA, 456 bp, Triticum turgidum subsp. dicoccon; identical to SEQ ID NO: 8378
  CDS (1)..(456)

SEQ ID NO: 9430 - protein, 151 aa, Triticum turgidum subsp. dicoccon; identical to SEQ ID NO: 8379

SEQ ID NO: 9431 - DNA, 456 bp, Triticum turgidum subsp. dicoccon; identical to SEQ ID NO: 8380
  CDS (1)..(456)

SEQ ID NO: 9432 - protein, 151 aa, Triticum turgidum subsp. dicoccon; identical to SEQ ID NO: 8381

SEQ ID NO: 9433 - DNA, 456 bp, Triticum turgidum subsp. durum (durum wheat); identical to SEQ ID NO: 8382
  CDS (1)..(456)

SEQ ID NO: 9434 - protein, 151 aa, Triticum turgidum subsp. durum (durum wheat); identical to SEQ ID NO: 8383

SEQ ID NO: 9435 - DNA, 456 bp, Triticum monococcum; identical to SEQ ID NO: 8384
  CDS (1)..(456)

SEQ ID NO: 9436 - protein, 151 aa, Triticum monococcum; identical to SEQ ID NO: 8385

SEQ ID NO: 9437 - DNA, 456 bp, Triticum monococcum; identical to SEQ ID NO: 8386
  CDS (1)..(456)

SEQ ID NO: 9438 - protein, 151 aa, Triticum monococcum; identical to SEQ ID NO: 8387

SEQ ID NO: 9439 - DNA, 456 bp, Triticum monococcum; identical to SEQ ID NO: 8388
  CDS (1)..(456)

SEQ ID NO: 9440 - protein, 151 aa, Triticum monococcum; identical to SEQ ID NO: 8389

SEQ ID NO: 9441 - DNA, 456 bp, Triticum monococcum; identical to SEQ ID NO: 8390
  CDS (1)..(456)

SEQ ID NO: 9442 - protein, 151 aa, Triticum monococcum; identical to SEQ ID NO: 8391

SEQ ID NO: 9443 - DNA, 465 bp, Malus domestica; identical to SEQ ID NO: 8392
  CDS (1)..(465)

SEQ ID NO: 9444 - protein, 154 aa, Malus domestica; identical to SEQ ID NO: 8393

SEQ ID NO: 9445 - DNA, 456 bp, Triticum aestivum; identical to SEQ ID NO: 8394
  CDS (1)..(456)

SEQ ID NO: 9446 - protein, 151 aa, Triticum aestivum; identical to SEQ ID NO: 8395

SEQ ID NO: 9447 - DNA, 453 bp, Camellia sinensis; identical to SEQ ID NO: 8396
  CDS (1)..(453)

SEQ ID NO: 9448 - protein, 150 aa, Camellia sinensis; identical to SEQ ID NO: 8397

SEQ ID NO: 9449 - DNA, 492 bp, Zea mays; identical to SEQ ID NO: 8398
  CDS (1)..(492)

SEQ ID NO: 9450 - protein, 163 aa, Zea mays; identical to SEQ ID NO: 8399

SEQ ID NO: 9451 - DNA, 483 bp, Arachis hypogaea; identical to SEQ ID NO: 8400
  CDS (1)..(483)

SEQ ID NO: 9452 - protein, 160 aa, Arachis hypogaea; identical to SEQ ID NO: 8401

SEQ ID NO: 9453 - DNA, 471 bp, Vigna unguiculata; identical to SEQ ID NO: 8402
  CDS (1)..(471)

SEQ ID NO: 9454 - protein, 156 aa, Vigna unguiculata; identical to SEQ ID NO: 8403

SEQ ID NO: 9455 - DNA, 459 bp, Leptospirillum sp. Group II '5-way CG'
  CDS (1)..(459): transl_table=11
atgacaagccttttaagatgggatcccgtaagggaactggaagacctgggacgccgactgactcccgtttttgcccggcttccccaggagacaagaacggacgagcggcaggcgatgactgctgtggactgggctcccgtggtcgatattgccgaagatggagaagcctatcatgtgacggtggagttgcctgagatccggaaagaggatgtcaaggtttccattgagaacgggattctggccatttcgggggagcgcaaaaagatctcggaagagaagaacgggaaaagataccaccgtattgaacgtctttacgggagtttcctccgcagtttctctcttccggatgacgccgatcctcaacgggtcacggcaacaatgaaggacggcgtattgcacgtcaagatcgaaaaactggccgaaacgaagccaaggtcagtcgagatcgaggtcggttaa

SEQ ID NO: 9456 - protein, 152 aa, Leptospirillum sp. Group II '5-way CG'
MTSLLRWDPVRELEDLGRRLTPVFARLPQETRTDERQAMTAVDWAPVVDIAEDGEAYHVTVELPEIRKEDVKVSIENGILAISGERKKISEEKNGKRYHRIERLYGSFLRSFSLPDDADPQRVTATMKDGVLHVKIEKLAETKPRSVEIEVG

SEQ ID NO: 9457 - DNA, 474 bp, Brassica rapa subsp. chinensis; identical to SEQ ID NO: 8404
  CDS (1)..(474)

SEQ ID NO: 9458 - protein, 157 aa, Brassica rapa subsp. chinensis; identical to SEQ ID NO: 8405

SEQ ID NO: 9459 - DNA, 459 bp, Zea mays; identical to SEQ ID NO: 8406
  CDS (1)..(459)

SEQ ID NO: 9460 - protein, 152 aa, Zea mays; identical to SEQ ID NO: 8407

SEQ ID NO: 9461 - DNA, 450 bp, Zea mays; identical to SEQ ID NO: 8408
  CDS (1)..(450)

SEQ ID NO: 9462 - protein, 149 aa, Zea mays; identical to SEQ ID NO: 8409

SEQ ID NO: 9463 - DNA, 477 bp, Zea mays; identical to SEQ ID NO: 8410
  CDS (1)..(477)

SEQ ID NO: 9464 - protein, 158 aa, Zea mays; identical to SEQ ID NO: 8411

SEQ ID NO: 9465 - DNA, 465 bp, Bacteroides pectinophilus ATCC 43243
  CDS (1)..(465): transl_table=11
atgttaatgcctagtatttttggagaagatttgtttgataattttatgaatgatttttcattttacaatgatgcaccattcgagaatgttgagaagaagctttacggacatcacgcaaagaatgttatgaagacggatatcaaggaaacggatgaaggatacgaacttgagattgaccttccgggcttcgcaaaggatgaagttaaggtttctctcgacaatggatatatgacagtttctgctgctaagggtcttgacaaggatgagcaggagaagaagtcaggtaagtatatccgccgtgaacgctatgcaggcgcctgcgagagatcgttctatgttggtgatgagattactgaagaagatgtaaagggcgagtttaagcacggaatgcttaagctgttcatacctaagaaggaagctaagccggaagttgaacagaagaagtacatttcaattgaaggctga

SEQ ID NO: 9466 - protein, 154 aa, Bacteroides pectinophilus ATCC 43243
MLMPSIFGEDLFDNFMNDFSFYNDAPFENVEKKLYGHHAKNVMKTDIKETDEGYELEIDLPGFAKDEVKVSLDNGYMTVSAAKGLDKDEQEKKSGKYIRRERYAGACERSFYVGDEITEEDVKGEFKHGMLKLFIPKKEAKPEVEQKKYISIEG

SEQ ID NO: 9467 - DNA, 486 bp, Medicago truncatula; identical to SEQ ID NO: 8412
  CDS (1)..(486)

SEQ ID NO: 9468 - protein, 161 aa, Medicago truncatula; identical to SEQ ID NO: 8413

SEQ ID NO: 9469 - DNA, 483 bp, Picea sitchensis; identical to SEQ ID NO: 8414
  CDS (1)..(483)

SEQ ID NO: 9470 - protein, 160 aa, Picea sitchensis; identical to SEQ ID NO: 8415

SEQ ID NO: 9471 - DNA, 456 bp, Ricinus communis; identical to SEQ ID NO: 8416
  CDS (1)..(456)

SEQ ID NO: 9472 - protein, 151 aa, Ricinus communis; identical to SEQ ID NO: 8417

SEQ ID NO: 9473 - DNA, 483 bp, Ricinus communis; identical to SEQ ID NO: 8418
  CDS (1)..(483)

SEQ ID NO: 9474 - protein, 160 aa, Ricinus communis; identical to SEQ ID NO: 8419

SEQ ID NO: 9475 - DNA, 474 bp, Ricinus communis; identical to SEQ ID NO: 8420
  CDS (1)..(474)

SEQ ID NO: 9476 - protein, 157 aa, Ricinus communis; identical to SEQ ID NO: 8421

SEQ ID NO: 9477 - DNA, 477 bp, Ricinus communis; identical to SEQ ID NO: 8422
  CDS (1)..(477)

SEQ ID NO: 9478 - protein, 158 aa, Ricinus communis; identical to SEQ ID NO: 8423

SEQ ID NO: 9479 - DNA, 462 bp, Ricinus communis; identical to SEQ ID NO: 8424
  CDS (1)..(462)

SEQ ID NO: 9480 - protein, 153 aa, Ricinus communis; identical to SEQ ID NO: 8425

SEQ ID NO: 9481 - DNA, 474 bp, Ricinus communis; identical to SEQ ID NO: 8426
  CDS (1)..(474)

SEQ ID NO: 9482 - protein, 157 aa, Ricinus communis; identical to SEQ ID NO: 8427

SEQ ID NO: 9483 - DNA, 489 bp, Ricinus communis; identical to SEQ ID NO: 8428
  CDS (1)..(489)

SEQ ID NO: 9484 - protein, 162 aa, Ricinus communis; identical to SEQ ID NO: 8429

SEQ ID NO: 9485 - DNA, 501 bp, Ricinus communis; identical to SEQ ID NO: 8430
  CDS (1)..(501)

SEQ ID NO: 9486 - protein, 166 aa, Ricinus communis; identical to SEQ ID NO: 8431

SEQ ID NO: 9487 - DNA, 471 bp, Ricinus communis; identical to SEQ ID NO: 8432
  CDS (1)..(471)

SEQ ID NO: 9488 - protein, 156 aa, Ricinus communis; identical to SEQ ID NO: 8433

SEQ ID NO: 9489 - DNA, 471 bp, Ricinus communis; identical to SEQ ID NO: 8434
  CDS (1)..(471)

SEQ ID NO: 9490 - protein, 156 aa, Ricinus communis; identical to SEQ ID NO: 8435

SEQ ID NO: 9491 - DNA, 420 bp, Ricinus communis
  CDS (1)..(420)
atgtctttgatccgatcattgtttggcaacccaatgtcaactgacatctgggcaccatctgggccatcgagcaatgagatttcatcattggctaatgcacaagttgattggaaggagacaccagaagctcatattttcaaggcagatcttccaggactgaagaaagaagaagtgaaagttgagattgaagaaggaagggttcttcaaatgagtggagaaagaagtgttgagaaggaagagaagaacgacaagtggcacttagtagagagaggtagaggcaagttcatgaggagattccggttaccagagaatgctaaggttgatgcagtgaaggcatcaatggagaatggtgtacttactgttactattccaaaggctgaggagaagaaacctgaagtcaagtccattcagatcaattga

SEQ ID NO: 9492 - protein, 139 aa, Ricinus communis
MSLIRSLFGNPMSTDIWAPSGPSSNEISSLANAQVDWKETPEAHIFKADLPGLKKEEVKVEIEEGRVLQMSGERSVEKEEKNDKWHLVERGRGKFMRRFRLPENAKVDAVKASMENGVLTVTIPKAEEKKPEVKSIQIN

SEQ ID NO: 9493 - DNA, 477 bp, Zea mays; identical to SEQ ID NO: 8436
  CDS (1)..(477)

SEQ ID NO: 9494 - protein, 158 aa, Zea mays; identical to SEQ ID NO: 8437

SEQ ID NO: 9495 - DNA, 474 bp, Brassica campestris; identical to SEQ ID NO: 8438
  CDS (1)..(474)

SEQ ID NO: 9496 - protein, 157 aa, Brassica campestris; identical to SEQ ID NO: 8439

SEQ ID NO: 9497 - DNA, 453 bp, Agrostis stolonifera var. palustris; identical to SEQ ID NO: 8440
  CDS (1)..(453)

SEQ ID NO: 9498 - protein, 150 aa, Agrostis stolonifera var. palustris; identical to SEQ ID NO: 8441

SEQ ID NO: 9499 - DNA, 471 bp, Fragaria ananassa; identical to SEQ ID NO: 8442
  CDS (1)..(471)

SEQ ID NO: 9500 - protein, 156 aa, Fragaria ananassa; identical to SEQ ID NO: 8443

SEQ ID NO: 9501 - DNA, 465 bp, Solanum peruvianum; identical to SEQ ID NO: 8444
  CDS (1)..(465)

SEQ ID NO: 9502 - protein, 154 aa, Solanum peruvianum; identical to SEQ ID NO: 8445

SEQ ID NO: 9503 - DNA, 474 bp, Cuscuta japonica; identical to SEQ ID NO: 8446
  CDS (1)..(474)

SEQ ID NO: 9504 - protein, 157 aa, Cuscuta japonica; identical to SEQ ID NO: 8447

SEQ ID NO: 9505 - DNA, 480 bp, Medicago truncatula; identical to SEQ ID NO: 8448
  CDS (1)..(480)

SEQ ID NO: 9506 - protein, 159 aa, Medicago truncatula; identical to SEQ ID NO: 8449

SEQ ID NO: 9507 - DNA, 468 bp, Codonopsis lanceolata; identical to SEQ ID NO: 8450
  CDS (1)..(468)

SEQ ID NO: 9508 - protein, 155 aa, Codonopsis lanceolata; identical to SEQ ID NO: 8451

SEQ ID NO: 9509 - DNA, 492 bp, Helianthus annuus; identical to SEQ ID NO: 8452
  CDS (1)..(492)

SEQ ID NO: 9510 - protein, 163 aa, Helianthus annuus; identical to SEQ ID NO: 8453

SEQ ID NO: 9511 - DNA, 471 bp, Helianthus annuus; identical to SEQ ID NO: 8454
  CDS (1)..(471)

SEQ ID NO: 9512 - protein, 156 aa, Helianthus annuus; identical to SEQ ID NO: 8455

SEQ ID NO: 9513 - DNA, 456 bp, Hordeum vulgare; identical to SEQ ID NO: 8456
  CDS (1)..(456)

SEQ ID NO: 9514 - protein, 151 aa, Hordeum vulgare; identical to SEQ ID NO: 8457

SEQ ID NO: 9515 - DNA, 480 bp, Nicotiana tabacum; identical to SEQ ID NO: 8458
  CDS (1)..(480)

SEQ ID NO: 9516 - protein, 159 aa, Nicotiana tabacum; identical to SEQ ID NO: 8459

SEQ ID NO: 9517 - DNA, 453 bp, Pennisetum americanum; identical to SEQ ID NO: 8460
  CDS (1)..(453)

SEQ ID NO: 9518 - protein, 150 aa, Pennisetum americanum; identical to SEQ ID NO: 8461

SEQ ID NO: 9519 - DNA, 459 bp, Pennisetum americanum; identical to SEQ ID NO: 8462
  CDS (1)..(459)

SEQ ID NO: 9520 - protein, 152 aa, Pennisetum americanum; identical to SEQ ID NO: 8463

SEQ ID NO: 9521 - DNA, 480 bp, Pennisetum americanum; identical to SEQ ID NO: 8464
  CDS (1)..(480)

SEQ ID NO: 9522 - protein, 159 aa, Pennisetum americanum; identical to SEQ ID NO: 8465

SEQ ID NO: 9523 - DNA, 486 bp, Pseudotsuga menziesii; identical to SEQ ID NO: 8466
  CDS (1)..(486)

SEQ ID NO: 9524 - protein, 161 aa, Pseudotsuga menziesii; identical to SEQ ID NO: 8467

SEQ ID NO: 9525 - DNA, 486 bp, Pseudotsuga menziesii; identical to SEQ ID NO: 8468
  CDS (1)..(486)

SEQ ID NO: 9526 - protein, 161 aa, Pseudotsuga menziesii; identical to SEQ ID NO: 8469

SEQ ID NO: 9527 - DNA, 456 bp, Triticum aestivum; identical to SEQ ID NO: 8470
  CDS (1)..(456)

SEQ ID NO: 9528 - protein, 151 aa, Triticum aestivum; identical to SEQ ID NO: 8471

SEQ ID NO: 9529 - DNA, 468 bp, Codonopsis lanceolata; identical to SEQ ID NO: 8472
  CDS (1)..(468)

SEQ ID NO: 9530 - protein, 155 aa, Codonopsis lanceolata; identical to SEQ ID NO: 8473

SEQ ID NO: 9531 - DNA, 465 bp, Carica papaya; identical to SEQ ID NO: 8474
  CDS (1)..(465)

SEQ ID NO: 9532 - protein, 154 aa, Carica papaya; identical to SEQ ID NO: 8475

SEQ ID NO: 9533 - DNA, 465 bp, Prunus persica; identical to SEQ ID NO: 8476
  CDS (1)..(465)

SEQ ID NO: 9534 - protein, 154 aa, Prunus persica; identical to SEQ ID NO: 8477

SEQ ID NO: 9535 - DNA, 480 bp, Capsicum frutescens; identical to SEQ ID NO: 8478
  CDS (1)..(480)

SEQ ID NO: 9536 - protein, 159 aa, Capsicum frutescens; identical to SEQ ID NO: 8479

SEQ ID NO: 9537 - DNA, 477 bp, Pisum sativum; identical to SEQ ID NO: 8480
  CDS (1)..(477)

SEQ ID NO: 9538 - protein, 158 aa, Pisum sativum; identical to SEQ ID NO: 8481

SEQ ID NO: 9539 - DNA, 471 bp, Ananas comosus
  CDS (1)..(471)
atgtctctggttcggcgaagcaacatcttcgatcccttctccctcgacctgtgggagcccttcgagggcttccccttcggcggcgccctctcgttcccgcgcccctcggcgtccttccccgcggagacagcgtcgttcgcgggcgcccgcatagattggaaggagacgccggaggcgcacgtgttcaaggcggatctgccgggggtgaagaaggaggaggtgaaggtggaggtggaggagggcaacgtcctgcagatcagcggcgagcgcaccagggagaaggaggagaagaacgacacctggcaccgcgtggagcgcagcagcggcaagttcctacgcaggttccgcctccccgacaacgccaaggtcgatcaggtcaaggccgccatggagaacggcgtgctcaccgtcaccgtccccaaggaggacgtcaagaagccccaggtcaagtccgtccagatctccggctga

SEQ ID NO: 9540 - protein, 156 aa, Ananas comosus
MSLVRRSNIFDPFSLDLWEPFEGFPFGGALSFPRPSASFPAETASFAGARIDWKETPEAHVFKADLPGVKKEEVKVEVEEGNVLQISGERTREKEEKNDTWHRVERSSGKFLRRFRLPDNAKVDQVKAAMENGVLTVTVPKEDVKKPQVKSVQISG

SEQ ID NO: 9541 - DNA, 486 bp, Pseudotsuga menziesii; identical to SEQ ID NO: 8482
  CDS (1)..(486)

SEQ ID NO: 9542 - protein, 161 aa, Pseudotsuga menziesii; identical to SEQ ID NO: 8483

SEQ ID NO: 9543 - DNA, 441 bp, Funaria hygrometrica
  CDS (1)..(441)
atggcactgtctctgttcgggcgtggcagcggcagcttcttcgatccgttcgacctgtcgctgctggagagcgggccttcgcggcagtttgcgcgcgacgcgcatgcggtggccaacacgcagattgattggcgtgagacgccggaggcgcacatcttcaaggcggacctgcccgggttgaagaaggaggaggtgaaggtgcagctggtggacggcaagacgttggagatcagcggggagaggaggaaggaagaggtgcacaaggacgatacatggcaccgcgtggagcgcgcgcacggcagcttcctgcggcggttccggctgcccgataacagcaacgtggaagcagtggaagcgcaggtgcaggacggagtgctcacggtgaccatcccgaagatccagaagccaaagccccaggtgcgacagatcgagatcgcgtag

SEQ ID NO: 9544 - protein, 146 aa, Funaria hygrometrica
MALSLFGRGSGSFFDPFDLSLLESGPSRQFARDAHAVANTQIDWRETPEAHIFKADLPGLKKEEVKVQLVDGKTLEISGERRKEEVHKDDTWHRVERAHGSFLRRFRLPDNSNVEAVEAQVQDGVLTVTIPKIQKPKPQVRQIEIA

SEQ ID NO: 9545 - DNA, 486 bp, Arabidopsis thaliana; identical to SEQ ID NO: 8484
  CDS (1)..(486)

SEQ ID NO: 9546 - protein, 161 aa, Arabidopsis thaliana; identical to SEQ ID NO: 8485

SEQ ID NO: 9547 - DNA, 468 bp, Arabidopsis thaliana; identical to SEQ ID NO: 8486
  CDS (1)..(468)

SEQ ID NO: 9548 - protein, 155 aa, Arabidopsis thaliana; identical to SEQ ID NO: 8487

SEQ ID NO: 9549 - DNA, 468 bp, Helianthus annuus; identical to SEQ ID NO: 8488
  CDS (1)..(468)

SEQ ID NO: 9550 - protein, 155 aa, Helianthus annuus; identical to SEQ ID NO: 8489

SEQ ID NO: 9551 - DNA, 468 bp, Helianthus annuus; identical to SEQ ID NO: 8490
  CDS (1)..(468)

SEQ ID NO: 9552 - protein, 155 aa, Helianthus annuus; identical to SEQ ID NO: 8491

SEQ ID NO: 9553 - DNA, 477 bp, Retama raetam; identical to SEQ ID NO: 8492
  CDS (1)..(477)

SEQ ID NO: 9554 - protein, 158 aa, Retama raetam; identical to SEQ ID NO: 8493

SEQ ID NO: 9555 - DNA, 453 bp, Hordeum vulgare; identical to SEQ ID NO: 8494
  CDS (1)..(453)

SEQ ID NO: 9556 - protein, 150 aa, Hordeum vulgare; identical to SEQ ID NO: 8495

SEQ ID NO: 9557 - DNA, 474 bp, Brassica oleracea; identical to SEQ ID NO: 8496
  CDS (1)..(474)

SEQ ID NO: 9558 - protein, 157 aa, Brassica oleracea; identical to SEQ ID NO: 8497

SEQ ID NO: 9559 - DNA, 483 bp, Malus domestica; identical to SEQ ID NO: 8498
  CDS (1)..(483)

SEQ ID NO: 9560 - protein, 160 aa, Malus domestica; identical to SEQ ID NO: 8499

SEQ ID NO: 9561 - DNA, 474 bp, Helianthus annuus; identical to SEQ ID NO: 8500
  CDS (1)..(474)

SEQ ID NO: 9562 - protein, 157 aa, Helianthus annuus; identical to SEQ ID NO: 8501

SEQ ID NO: 9563 - DNA, 480 bp, Nicotiana tabacum; identical to SEQ ID NO: 8502
  CDS (1)..(480)

SEQ ID NO: 9564 - protein, 159 aa, Nicotiana tabacum; identical to SEQ ID NO: 8503

SEQ ID NO: 9565 - DNA, 465 bp, Solanum lycopersicum; identical to SEQ ID NO: 8504
  CDS (1)..(465)

SEQ ID NO: 9566 - protein, 154 aa, Solanum lycopersicum; identical to SEQ ID NO: 8505

SEQ ID NO: 9567 - DNA, 465 bp, Solanum lycopersicum; identical to SEQ ID NO: 8506
  CDS (1)..(465)

SEQ ID NO: 9568 - protein, 154 aa, Solanum lycopersicum; identical to SEQ ID NO: 8507

SEQ ID NO: 9569 - DNA, 465 bp, Solanum lycopersicum; identical to SEQ ID NO: 8508
  CDS (1)..(465)

SEQ ID NO: 9570 - protein, 154 aa, Solanum lycopersicum; identical to SEQ ID NO: 8509

SEQ ID NO: 9571 - DNA, 429 bp, Thermotoga maritima
  CDS (1)..(429): transl_table=11
atgcttcttggaagaagagaagacatcttcaggccgttcagggaactccagagggagatcgacaggctcttcgatgacttcttcaggacggaggtcagacccgctccagacatggatgtgttcgaaacagacgatgaagtagtgatagaagtagaaatcccaggcatagacagaaaagacgtccaaataacggttgaagagaacattttgaagatctctggtgaaaagaaactcgaaagagaacagaaaggtaaaaactattactacgttgagagaagcgctggaaaattcgaaagggcaatcagactcccagactacgttgacgtagaaaagatcaaagcagagtacaagaacggtgttctcacgataagggttcccaagaaagaagaaaggaagaagaaagtgatcgaggtggaggttcaggagtaa

SEQ ID NO: 9572 - protein, 142 aa, Thermotoga maritima
MLLGRREDIFRPFRELQREIDRLFDDFFRTEVRPAPDMDVFETDDEVVIEVEIPGIDRKDVQITVEENILKISGEKKLEREQKGKNYYYVERSAGKFERAIRLPDYVDVEKIKAEYKNGVLTIRVPKKEERKKKVIEVEVQE

SEQ ID NO: 9573 - DNA, 465 bp, Quercus suber; identical to SEQ ID NO: 8512
  CDS (1)..(465)

SEQ ID NO: 9574 - protein, 154 aa, Quercus suber; identical to SEQ ID NO: 8513

SEQ ID NO: 9575 - DNA, 453 bp, Corylus avellana; identical to SEQ ID NO: 8514
  CDS (1)..(453)

SEQ ID NO: 9576 - protein, 150 aa, Corylus avellana; identical to SEQ ID NO: 8515

SEQ ID NO: 9577 - DNA, 465 bp, Castanea sativa; identical to SEQ ID NO: 8516
  CDS (1)..(465)

SEQ ID NO: 9578 - protein, 154 aa, Castanea sativa; identical to SEQ ID NO: 8517

SEQ ID NO: 9579 - DNA, 450 bp, Funaria hygrometrica; identical to SEQ ID NO: 8520
  CDS (1)..(450)

SEQ ID NO: 9580 - protein, 149 aa, Funaria hygrometrica; identical to SEQ ID NO: 8521

SEQ ID NO: 9581 - DNA, 462 bp, Funaria hygrometrica; identical to SEQ ID NO: 8522
  CDS (1)..(462)

SEQ ID NO: 9582 - protein, 153 aa, Funaria hygrometrica; identical to SEQ ID NO: 8523

SEQ ID NO: 9583 - DNA, 462 bp, Funaria hygrometrica; identical to SEQ ID NO: 8524
  CDS (1)..(462)

SEQ ID NO: 9584 - protein, 153 aa, Funaria hygrometrica; identical to SEQ ID NO: 8525

SEQ ID NO: 9585 - DNA, 486 bp, Chenopodium rubrum; identical to SEQ ID NO: 8526
  CDS (1)..(486)

SEQ ID NO: 9586 - protein, 161 aa, Chenopodium rubrum; identical to SEQ ID NO: 8527

SEQ ID NO: 9587 - DNA, 474 bp, Daucus carota; identical to SEQ ID NO: 8528
  CDS (1)..(474)

SEQ ID NO: 9588 - protein, 157 aa, Daucus carota; identical to SEQ ID NO: 8529

SEQ ID NO: 9589 - DNA, 462 bp, Helianthus annuus; identical to SEQ ID NO: 8530
  CDS (1)..(462)

SEQ ID NO: 9590 - protein, 153 aa, Helianthus annuus; identical to SEQ ID NO: 8531

SEQ ID NO: 9591 - DNA, 477 bp, Pisum sativum; identical to SEQ ID NO: 8532
  CDS (1)..(477)

SEQ ID NO: 9592 - protein, 158 aa, Pisum sativum; identical to SEQ ID NO: 8533

SEQ ID NO: 9593 - DNA, 465 bp, Solanum lycopersicum; identical to SEQ ID NO: 8534
  CDS (1)..(465)

SEQ ID NO: 9594 - protein, 154 aa, Solanum lycopersicum; identical to SEQ ID NO: 8535

SEQ ID NO: 9595 - DNA, 465 bp, Solanum peruvianum; identical to SEQ ID NO: 8536
  CDS (1)..(465)

SEQ ID NO: 9596 - protein, 154 aa, Solanum peruvianum; identical to SEQ ID NO: 8537

SEQ ID NO: 9597 - DNA, 456 bp, Triticum aestivum; identical to SEQ ID NO: 8538
  CDS (1)..(456)

SEQ ID NO: 9598 - protein, 151 aa, Triticum aestivum; identical to SEQ ID NO: 8539

SEQ ID NO: 9599 - DNA, 480 bp, Daucus carota; identical to SEQ ID NO: 8540
  CDS (1)..(480)

SEQ ID NO: 9600 - protein, 159 aa, Daucus carota; identical to SEQ ID NO: 8541

SEQ ID NO: 9601 - DNA, 477 bp, Medicago sativa; identical to SEQ ID NO: 8542
  CDS (1)..(477)

SEQ ID NO: 9602 - protein, 158 aa, Medicago sativa; identical to SEQ ID NO: 8543

SEQ ID NO: 9603 - DNA, 465 bp, Solanum peruvianum; identical to SEQ ID NO: 8544
  CDS (1)..(465)

SEQ ID NO: 9604 - protein, 154 aa, Solanum peruvianum; identical to SEQ ID NO: 8545

SEQ ID NO: 9605 - DNA, 465 bp, Glycine max; identical to SEQ ID NO: 8546
  CDS (1)..(465)

SEQ ID NO: 9606 - protein, 154 aa, Glycine max; identical to SEQ ID NO: 8547

SEQ ID NO: 9607 - DNA, 486 bp, Glycine max; identical to SEQ ID NO: 8548
  CDS (1)..(486)

SEQ ID NO: 9608 - protein, 161 aa, Glycine max; identical to SEQ ID NO: 8549

SEQ ID NO: 9609 - DNA, 462 bp, Brassica napus; identical to SEQ ID NO: 8550
  CDS (1)..(462)

SEQ ID NO: 9610 - protein, 153 aa, Brassica napus; identical to SEQ ID NO: 8551

SEQ ID NO: 9611 - DNA, 471 bp, Brassica napus
  CDS (1)..(471)
atgtcgatgattccgagcttcttcggcaacaacaggcgcggcggcagcagcttcttcgatcctttttctcttgatgtttgggatccgttcaaggactttccatcatcttcttcgttttcacgggagaactccgcgattgtgaacgcgcgtgtggactggagggagactcctgacgcgcacgtgttcaaggcggatttgcctgggatgaagaaggaggaagtgaaggtggagatcgaggatgacagcgtgttgaagatcagtggggagaggcacgtggagaaggaggataagaacgatacgtggcaccgcgtggagaggtcgagcgggcagttcacgaggaagtttaggcttccggagaatgtgaagatggatcaggtgaaggctgcgatggagaacggggttctgactgtgactgtgccgaaggcggagatgaagaaacctgatgtcaaatctattcagatctctggctga

SEQ ID NO: 9612 - protein, 156 aa, Brassica napus
MSMIPSFFGNNRRGGSSFFDPFSLDVWDPFKDFPSSSSFSRENSAIVNARVDWRETPDAHVFKADLPGMKKEEVKVEIEDDSVLKISGERHVEKEDKNDTWHRVERSSGQFTRKFRLPENVKMDQVKAAMENGVLTVTVPKAEMKKPDVKSIQISG

SEQ ID NO: 9613 - DNA, 483 bp, Brassica napus; identical to SEQ ID NO: 8552
  CDS (1)..(483)

SEQ ID NO: 9614 - protein, 160 aa, Brassica napus; identical to SEQ ID NO: 8553

SEQ ID NO: 9615 - DNA, 471 bp, Brassica napus; identical to SEQ ID NO: 8554
  CDS (1)..(471)

SEQ ID NO: 9616 - protein, 156 aa, Brassica napus; identical to SEQ ID NO: 8555

SEQ ID NO: 9617 - DNA, 465 bp, Brassica napus
  CDS (1)..(465)
atggaatttgtaaggtttccgatagtctcaatcctcgaagacatgctagaagttcccgaagagcacaacgagaagagccgcaacaatccttcaagagcttacatgcgggacgcaaaggcaatggcggctacgccagccgacgtgatcgagcacgcgaacgcgtacgttttcgtggtggacatgcctggaatcaaaggagaggagatcaaggttcaggtggaggacgagaacgtgcttgtggtgagtggagagaggcagagagagaacaaggagagcgagggtgtgaagtatgtgaggatggagaggaggatggggaagtttatgaggaagtttcagttgcctgagaacgctgatttggagaagatctctgctgtttgtaacgatggtgtgttgaaggtgactgttcagaagcttcctcctcctgagcctaagaaaccaaagactatccaagtccaagttgcttga

SEQ ID NO: 9618 - protein, 154 aa, Brassica napus
MEFVRFPIVSILEDMLEVPEEHNEKSRNNPSRAYMRDAKAMAATPADVIEHANAYVFVVDMPGIKGEEIKVQVEDENVLVVSGERQRENKESEGVKYVRMERRMGKFMRKFQLPENADLEKISAVCNDGVLKVTVQKLPPPEPKKPKTIQVQVA

SEQ ID NO: 9619 - DNA, 471 bp, Brassica napus; identical to SEQ ID NO: 8556
  CDS (1)..(471)

SEQ ID NO: 9620 - protein, 156 aa, Brassica napus; identical to SEQ ID NO: 8557

SEQ ID NO: 9621 - DNA, 483 bp, Brassica napus; identical to SEQ ID NO: 8558
  CDS (1)..(483)

SEQ ID NO: 9622 - protein, 160 aa, Brassica napus; identical to SEQ ID NO: 8559

SEQ ID NO: 9623 - DNA, 474 bp, Brassica napus; identical to SEQ ID NO: 8560
  CDS (1)..(474)

SEQ ID NO: 9624 - protein, 157 aa, Brassica napus; identical to SEQ ID NO: 8561

SEQ ID NO: 9625 - DNA, 459 bp, Brassica napus; identical to SEQ ID NO: 8562
  CDS (1)..(459)

SEQ ID NO: 9626 - protein, 152 aa, Brassica napus; identical to SEQ ID NO: 8563

SEQ ID NO: 9627 - DNA, 465 bp, Glycine max; identical to SEQ ID NO: 8564
  CDS (1)..(465)

SEQ ID NO: 9628 - protein, 154 aa, Glycine max; identical to SEQ ID NO: 8565

SEQ ID NO: 9629 - DNA, 459 bp, Glycine max; identical to SEQ ID NO: 8566
  CDS (1)..(459)

SEQ ID NO: 9630 - protein, 152 aa, Glycine max; identical to SEQ ID NO: 8567

SEQ ID NO: 9631 - DNA, 483 bp, Triticum aestivum
  CDS (1)..(483)
atggcgggcatggtgttcggcttggagaacccgatgatgacggcgctgcagcacctgctggacatcccggacggcgaggccggcaacaccgccggcggcgagaagcagggcccgacgcgcgcctacgtccgggacgcgcgcgccatggcggccaccccggccgacgttaaggagctgccgggcgcgtacgcgttcgtggtggacatgccggggctggggtccggcgacatcaaggtgcaggtggaggacgagcgggtgctggtgatcagcggcgagcgcaggagggaggagaaggaggaagccaagtacatgcggatggagcgccgcatggggaagctgatgcgcaagttcgtgctgccagagaacgccgacatggagaagatctccgccgcgtgccgcgacggcgtgctcaccgtcaccgtcgagaagctgccgccgcccgagccgaagaagcccaagaccatccaggtccaggtcgcctga

SEQ ID NO: 9632 - protein, 160 aa, Triticum aestivum
MAGMVFGLENPMMTALQHLLDIPDGEAGNTAGGEKQGPTRAYVRDARAMAATPADVKELPGAYAFVVDMPGLGSGDIKVQVEDERVLVISGERRREEKEEAKYMRMERRMGKLMRKFVLPENADMEKISAACRDGVLTVTVEKLPPPEPKKPKTIQVQVA

SEQ ID NO: 9633 - DNA, 477 bp, Triticum aestivum; identical to SEQ ID NO: 8570
  CDS (1)..(477)

SEQ ID NO: 9634 - protein, 158 aa, Triticum aestivum; identical to SEQ ID NO: 8571

SEQ ID NO: 9635 - DNA, 474 bp, Triticum aestivum; identical to SEQ ID NO: 8572
  CDS (1)..(474)

SEQ ID NO: 9636 - protein, 157 aa, Triticum aestivum; identical to SEQ ID NO: 8573

SEQ ID NO: 9637 - DNA, 468 bp, Triticum aestivum; identical to SEQ ID NO: 8574
  CDS (1)..(468)

SEQ ID NO: 9638 - protein, 155 aa, Triticum aestivum; identical to SEQ ID NO: 8575

SEQ ID NO: 9639 - DNA, 474 bp, Triticum aestivum; identical to SEQ ID NO: 8576
  CDS (1)..(474)

SEQ ID NO: 9640 - protein, 157 aa, Triticum aestivum; identical to SEQ ID NO: 8577

SEQ ID NO: 9641 - DNA, 477 bp, Zea mays; identical to SEQ ID NO: 8578
  CDS (1)..(477)

SEQ ID NO: 9642 - protein, 158 aa, Zea mays; identical to SEQ ID NO: 8579

SEQ ID NO: 9643 - DNA, 477 bp, Linum usitatissimum; identical to SEQ ID NO: 8580
  CDS (1)..(477)

SEQ ID NO: 9644 - protein, 158 aa, Linum usitatissimum; identical to SEQ ID NO: 8581

SEQ ID NO: 9645 - DNA, 483 bp, Zea mays; identical to SEQ ID NO: 8582
  CDS (1)..(483)

SEQ ID NO: 9646 - protein, 160 aa, Zea mays; identical to SEQ ID NO: 8583

SEQ ID NO: 9647 - DNA, 477 bp, Hordeum vulgare; identical to SEQ ID NO: 8584
  CDS (1)..(477)

SEQ ID NO: 9648 - protein, 158 aa, Hordeum vulgare; identical to SEQ ID NO: 8585

SEQ ID NO: 9649 - DNA, 456 bp, Hordeum vulgare; identical to SEQ ID NO: 8586
  CDS (1)..(456)

SEQ ID NO: 9650 - protein, 151 aa, Hordeum vulgare; identical to SEQ ID NO: 8587

SEQ ID NO: 9651 - DNA, 456 bp, Hordeum vulgare; identical to SEQ ID NO: 8588
  CDS (1)..(456)

SEQ ID NO: 9652 - protein, 151 aa, Hordeum vulgare; identical to SEQ ID NO: 8589

SEQ ID NO: 9653 - DNA, 492 bp, Helianthus annuus; identical to SEQ ID NO: 8590
  CDS (1)..(492)

SEQ ID NO: 9654 - protein, 163 aa, Helianthus annuus; identical to SEQ ID NO: 8591

SEQ ID NO: 9655 - DNA, 465 bp, Brassica napus
  CDS (1)..(465)
atggatttcggaaggttcccgatcatctcaatcctcgaagacatgctcgaggtccccgaagagcacagcgagaagggccgcagcaacccgtcgagagcttacgtgagagaccagaaggcgatggcggctacgccagctgacgtcatcgagcaacccgacgcgtacgctttcgtggtggacatgcctgggatcaaaggagacgagatcaaggtccaggtcgagagcgacaacgtgctcgtggtgagcggagagaggaagagggagagcaaggagaacgagggagtgaagtatgtgaggatggagaggaggatggggaagttcatgaggaagtttcagttgcctgagaatgcggatttggagaagatatctgcttcttgtaatgacggtgtgttgaaagtgactgttgggaagcttcctcctcctgagcctaagaaaccgaagactattcaggtccaagtcgcttga

SEQ ID NO: 9656 - protein, 154 aa, Brassica napus
MDFGRFPIISILEDMLEVPEEHSEKGRSNPSRAYVRDQKAMAATPADVIEQPDAYAFVVDMPGIKGDEIKVQVESDNVLVVSGERKRESKENEGVKYVRMERRMGKFMRKFQLPENADLEKISASCNDGVLKVTVGKLPPPEPKKPKTIQVQVA

SEQ ID NO: 9657 - DNA, 465 bp, Brassica napus
  CDS (1)..(465)
atggaatttgtaaggtttccgatagtctcaatcctcgaagacatgctagaagttcccgaagagcacaacgagaagagccgcaacaatccttcaagagcttacatgcgggacgcaaaggcaatggcggctacaccagccgacgtgatcgagcacccgaacgcgtacgttttcgtggtggacatgcctggaatcaaaggagaggagatcaaggttcaggtggagaacgagaatgtgcttgtggtgagcggagagaggcagagagagaacaaggagagcgagggtgtgaagtatgtgaggatggagaggagaatggggaagtttatgaggaagtttcagttgcctgagaatgctgatttggagaagatctctgctgtttgtcacgatggtgtattgaaggtgactgttcagaagcttcctcctcctgagcctaagaaaccaaagactattcaggtccaagtggcttga

SEQ ID NO: 9658 - protein, 154 aa, Brassica napus
MEFVRFPIVSILEDMLEVPEEHNEKSRNNPSRAYMRDAKAMAATPADVIEHPNAYVFVVDMPGIKGEEIKVQVENENVLVVSGERQRENKESEGVKYVRMERRMGKFMRKFQLPENADLEKISAVCHDGVLKVTVQKLPPPEPKKPKTIQVQVA

SEQ ID NO: 9659 - DNA, 474 bp, Brassica napus; identical to SEQ ID NO: 8596
  CDS (1)..(474)

SEQ ID NO: 9660 - protein, 157 aa, Brassica napus; identical to SEQ ID NO: 8597

SEQ ID NO: 9661 - DNA, 474 bp, Brassica napus; identical to SEQ ID NO: 8598
  CDS (1)..(474)

SEQ ID NO: 9662 - protein, 157 aa, Brassica napus; identical to SEQ ID NO: 8599

SEQ ID NO: 9663 - DNA, 462 bp, Brassica napus; identical to SEQ ID NO: 8602
  CDS (1)..(462)

SEQ ID NO: 9664 - protein, 153 aa, Brassica napus; identical to SEQ ID NO: 8603

SEQ ID NO: 9665 - DNA, 465 bp, Brassica napus
  CDS (1)..(465)
atggatttcggaaggttcccgatcatctccatcctcgaagacatgctcgaagtccccgaagagcacagcgagaagggccgcagcaacccgtcgagagcttacgtgagagaccagaaggcgatggcggctacgccagctgacgtcatcgagcatcccgacgcgtacgctttcgtggtggacatgcctgggatcaaaggagacgagatcaaggttcaggtcgagagcgataacttgctcgtggtgagcggagagaggaagagggagaacaaggagaacgagggagtgaagtatgtgaggatggagaggaggatggggaagttcatgaggaagtttcagttgcctgagaatgcggatttggagaagatctctgcttcttgtaatgacggtgtgttgaaagtgactgtcgggaagctccctcctcctgagcctaagaagccgaagactatccaggtccaagtggcttga

SEQ ID NO: 9666 - protein, 154 aa, Brassica napus
MDFGRFPIISILEDMLEVPEEHSEKGRSNPSRAYVRDQKAMAATPADVIEHPDAYAFVVDMPGIKGDEIKVQVESDNLLVVSGERKRENKENEGVKYVRMERRMGKFMRKFQLPENADLEKISASCNDGVLKVTVGKLPPPEPKKPKTIQVQVA

SEQ ID NO: 9667 - DNA, 483 bp, Brassica napus; identical to SEQ ID NO: 8604
  CDS (1)..(483)

SEQ ID NO: 9668 - protein, 160 aa, Brassica napus; identical to SEQ ID NO: 8605

SEQ ID NO: 9669 - DNA, 483 bp, Brassica napus; identical to SEQ ID NO: 8608
  CDS (1)..(483)

SEQ ID NO: 9670 - protein, 160 aa, Brassica napus; identical to SEQ ID NO: 8609

SEQ ID NO: 9671 - DNA, 480 bp, Glycine max; identical to SEQ ID NO: 8612
  CDS (1)..(480)

SEQ ID NO: 9672 - protein, 159 aa, Glycine max; identical to SEQ ID NO: 8613

SEQ ID NO: 9673 - DNA, 480 bp, Glycine max
  CDS (1)..(480)
atggatttcagagtgatgggtttggagtctccactgttccacacgctgcaacacatgatggacatgtcagaggacggtgcaggagacaacaagacacacaatgctccaacatggtcatacgttcgagacgcgaaagcaatggctgcaacacctgcggatgtgaaggagtatccgaattcttacgtgttcgagatcgacatgccgggtttgaaatctggggacataaaggttcaagttgaagacgacaacctgcttctgatatgtggggaacgaaagagggacgaagagaaagaaggggcgaagtatttgagaatggagagaagggttgggaagttaatgcgcaagtttgtgctgcctgagaatgccaacactgatgcaatctctgctgtgtgccaagatggtgtgcttagtgtaaccgtgcagaaattgcctccacctgagcctaagaaacctaggactattcaggttaaggttgcttga

SEQ ID NO: 9674 - protein, 159 aa, Glycine max
MDFRVMGLESPLFHTLQHMMDMSEDGAGDNKTHNAPTWSYVRDAKAMAATPADVKEYPNSYVFEIDMPGLKSGDIKVQVEDDNLLLICGERKRDEEKEGAKYLRMERRVGKLMRKFVLPENANTDAISAVCQDGVLSVTVQKLPPPEPKKPRTIQVKVA

SEQ ID NO: 9675 - DNA, 462 bp, Glycine max; identical to SEQ ID NO: 8620
  CDS (1)..(462)

SEQ ID NO: 9676 - protein, 153 aa, Glycine max; identical to SEQ ID NO: 8621

SEQ ID NO: 9677 - DNA, 486 bp, Glycine max; identical to SEQ ID NO: 8622
  CDS (1)..(486)

SEQ ID NO: 9678 - protein, 161 aa, Glycine max; identical to SEQ ID NO: 8623

SEQ ID NO: 9679 - DNA, 594 bp, Glycine max; identical to SEQ ID NO: 8624
  CDS (1)..(594)

SEQ ID NO: 9680 - protein, 197 aa, Glycine max; identical to SEQ ID NO: 8625

SEQ ID NO: 9681 - DNA, 456 bp, Hordeum vulgare; identical to SEQ ID NO: 8626
  CDS (1)..(456)

SEQ ID NO: 9682 - protein, 151 aa, Hordeum vulgare; identical to SEQ ID NO: 8627

SEQ ID NO: 9683 - DNA, 477 bp, Hordeum vulgare; identical to SEQ ID NO: 8628
  CDS (1)..(477)

SEQ ID NO: 9684 - protein, 158 aa, Hordeum vulgare; identical to SEQ ID NO: 8629

SEQ ID NO: 9685 - DNA, 501 bp, Oryza sativa; identical to SEQ ID NO: 8630
  CDS (1)..(501)

SEQ ID NO: 9686 - protein, 166 aa, Oryza sativa; identical to SEQ ID NO: 8631

SEQ ID NO: 9687 - DNA, 504 bp, Zea mays; identical to SEQ ID NO: 8632
  CDS (1)..(504)

SEQ ID NO: 9688 - protein, 167 aa, Zea mays; identical to SEQ ID NO: 8633

SEQ ID NO: 9689 - DNA, 465 bp, Zea mays; identical to SEQ ID NO: 8634
  CDS (1)..(465)

SEQ ID NO: 9690 - protein, 154 aa, Zea mays; identical to SEQ ID NO: 8635

SEQ ID NO: 9691 - DNA, 474 bp, Triticum aestivum; identical to SEQ ID NO: 8636
  CDS (1)..(474)

SEQ ID NO: 9692 - protein, 157 aa, Triticum aestivum; identical to SEQ ID NO: 8637

SEQ ID NO: 9693 - DNA, 477 bp, Triticum aestivum; identical to SEQ ID NO: 8638
  CDS (1)..(477)

SEQ ID NO: 9694 - protein, 158 aa, Triticum aestivum; identical to SEQ ID NO: 8639

SEQ ID NO: 9695 - DNA, 456 bp, Triticum aestivum; identical to SEQ ID NO: 8640
  CDS (1)..(456)

SEQ ID NO: 9696 - protein, 151 aa, Triticum aestivum; identical to SEQ ID NO: 8641

SEQ ID NO: 9697 - DNA, 456 bp, Triticum aestivum; identical to SEQ ID NO: 8642
  CDS (1)..(456)

SEQ ID NO: 9698 - protein, 151 aa, Triticum aestivum; identical to SEQ ID NO: 8643

SEQ ID NO: 9699 - DNA, 456 bp, Triticum aestivum; identical to SEQ ID NO: 8644
  CDS (1)..(456)

SEQ ID NO: 9700 - protein, 151 aa, Triticum aestivum; identical to SEQ ID NO: 8645

SEQ ID NO: 9701 - DNA, 459 bp, Triticum aestivum; identical to SEQ ID NO: 8646
  CDS (1)..(459)

SEQ ID NO: 9702 - protein, 152 aa, Triticum aestivum; identical to SEQ ID NO: 8647

SEQ ID NO: 9703 - DNA, 468 bp, Triticum aestivum; identical to SEQ ID NO: 8648
  CDS (1)..(468)

SEQ ID NO: 9704 - protein, 155 aa, Triticum aestivum; identical to SEQ ID NO: 8649

SEQ ID NO: 9705 - DNA, 474 bp, Triticum aestivum; identical to SEQ ID NO: 8650
  CDS (1)..(474)

SEQ ID NO: 9706 - protein, 157 aa, Triticum aestivum; identical to SEQ ID NO: 8651

SEQ ID NO: 9707 - DNA, 462 bp, Glycine max; identical to SEQ ID NO: 8652
  CDS (1)..(462)

SEQ ID NO: 9708 - protein, 153 aa, Glycine max; identical to SEQ ID NO: 8653

SEQ ID NO: 9709 - DNA, 483 bp, Zea mays; identical to SEQ ID NO: 8654
  CDS (1)..(483)

SEQ ID NO: 9710 - protein, 160 aa, Zea mays; identical to SEQ ID NO: 8655

SEQ ID NO: 9711 - DNA, 555 bp, Zea mays
  CDS (1)..(555)
atgtcgatgctcaccagcatactgggccgcaagcatcagccgccgccgcagcagcagcagcagcagaagggcggcggcgcgcgcactggcaccggcgccggcgccggcacggaggcggcggcagtggagccggtgagcatcgacatcgcggagcaggggccgctagtggacgccatcacgctggcggcgttcgcggcgccggcgctaggcctgccgccgttcgcgacggccagcatggactggaaggagacgccgacggcgcacgtgttcatggcggacctccccgggctgcgccgcgacgaggtgaaggtggaggtggaggaggagaggctgctccggatcagcgggcagcggcagcgcgccgccgaggagaagggcgaccgctggcaccgcgtcgagcgcagctccgaccgcttcgtgcgcaccgtgcgcctcccgcccaacgccaacaccgacggcgcgcaggccgcgctccaggacggcgtgctcaccgtcaccgtgcccaaggacaacgaccgcaaggcctacggcaggctcatcaccatcaccaattaa

SEQ ID NO: 9712 - protein, 184 aa, Zea mays
MSMLTSILGRKHQPPPQQQQQQKGGGARTGTGAGAGTEAAAVEPVSIDIAEQGPLVDAITLAAFAAPALGLPPFATASMDWKETPTAHVFMADLPGLRRDEVKVEVEEERLLRISGQRQRAAEEKGDRWHRVERSSDRFVRTVRLPPNANTDGAQAALQDGVLTVTVPKDNDRKAYGRLITITN

SEQ ID NO: 9713 - DNA, 501 bp, Zea mays; identical to SEQ ID NO: 8656
  CDS (1)..(501)

SEQ ID NO: 9714 - protein, 166 aa, Zea mays; identical to SEQ ID NO: 8657

SEQ ID NO: 9715 - DNA, 465 bp, Zea mays; identical to SEQ ID NO: 8658
  CDS (1)..(465)

SEQ ID NO: 9716 - protein, 154 aa, Zea mays; identical to SEQ ID NO: 8659

SEQ ID NO: 9717 - DNA, 483 bp, Zea mays; identical to SEQ ID NO: 8660
  CDS (1)..(483)

SEQ ID NO: 9718 - protein, 160 aa, Zea mays; identical to SEQ ID NO: 8661

SEQ ID NO: 9719 - DNA, 483 bp, Zea mays; identical to SEQ ID NO: 8662
  CDS (1)..(483)

SEQ ID NO: 9720 - protein, 160 aa, Zea mays; identical to SEQ ID NO: 8663

SEQ ID NO: 9721 - DNA, 25 bp, Artificial sequence
  primer
atgtctctagttccgagcttttttg

SEQ ID NO: 9722 - DNA, 20 bp, Artificial sequence
  primer
ttaaccagagatatcaacgg

SEQ ID NO: 9723 - protein, 227 aa, Artificial sequence
  consensus sequence
  Variant (2)..(5): Xaa in position 2 to 5 is any amino acid
  Variant (6)..(20): Xaa in position 6 to 20 is any or no amino acid
  Variant (22)..(22): Xaa in position 22 is any amino acid
  Variant (23)..(43): Xaa in position 23 to 43 is any or no amino acid
  Variant (45)..(55): Xaa in position 45 to 55 is any amino acid
  Variant (56)..(85): Xaa in position 56 to 85 is any or no amino acid
  Variant (87)..(89): Xaa in position 87 to 89 is any amino acid
  Variant (90)..(92): Xaa in position 90 to 92 is any or no amino acid
  Variant (95)..(95): Xaa in position 95 is any amino acid
  Variant (96)..(96): Xaa in position 96 is any or no amino acid
  Variant (100)..(100): Xaa in position 100 is any amino acid
  Variant (103)..(103): Xaa in position 103 is any amino acid
  Variant (108)..(108): Xaa in position 108 is any amino acid
  Variant (110)..(110): Xaa in position 110 is any amino acid
  Variant (112)..(112): Xaa in position 112 is any amino acid
  Variant (121)..(121): Xaa in position 121 is any amino acid
  Variant (123)..(125): Xaa in position 123 to 125 is any amino acid
  Variant (126)..(127): Xaa in position 126 to 127 is any or no amino acid
  Variant (129)..(129): Xaa in position 129 is any amino acid
  Variant (135)..(135): Xaa in position 135 is any amino acid
  Variant (136)..(136): Xaa in position 136 is any or no amino acid
  Variant (138)..(138): Xaa in position 138 is any amino acid
  Variant (140)..(140): Xaa in position 140 is any amino acid
  Variant (141)..(147): Xaa in position 141 to 147 is any or no amino acid
  Variant (149)..(149): Xaa in position 149 is any amino acid
  Variant (151)..(151): Xaa in position 151 is any amino acid
  Variant (152)..(155): Xaa in position 152 to 155 is any or no amino acid
  Variant (159)..(159): Xaa in position 159 is any amino acid
  Variant (163)..(163): Xaa in position 163 is any amino acid
  Variant (165)..(165): Xaa in position 165 is any amino acid
  Variant (167)..(167): Xaa in position 167 is any amino acid
  Variant (175)..(181): Xaa in position 175 to 181 is any amino acid
  Variant (184)..(185): Xaa in position 184 to 185 is any amino acid
  Variant (191)..(192): Xaa in position 191 to 192 is any amino acid
  Variant (199)..(201): Xaa in position 199 to 201 is any amino acid
  Variant (202)..(217): Xaa in position 202 to 217 is any or no amino acid
  Variant (219)..(219): Xaa in position 219 is any amino acid
  Variant (220)..(220): Xaa in position 220 is any or no amino acid
  Variant (223)..(223): Xaa in position 223 is any amino acid
  Variant (224)..(224): Xaa in position 224 is any or no amino acid
  Variant (226)..(226): Xaa in position 226 is any amino acid
MXXXXXXXXXXXXXXXXXXXDXXXXXXXXXXXXXXXXXXXXXXPXXXXXXXXXXXXXXXXXXXXXXXXXXXXXXXXXXXXXXXXXAXXXXXXDWXXETPXAHXFKADXPXGXKKEEVKVEXEXXXXXLXISGERXXEXEXXXXXXXXKXDXXXXXWHRXERSXGXFXRRFRLPEXXXXXXXKAXXENGVLXXTVTVPKXXXXXXXXXXXXXXXXXXXKXXVKXXIXI

SEQ ID NO: 9724 - protein, 39 aa, Artificial sequence
  protein pattern
  Variant (3)..(3): Xaa in position 3 is Ala, Gly or Ser
  Variant (4)..(4): Xaa in position 4 is any amino acid
  Variant (6)..(6): Xaa in position 6 is any amino acid
  Variant (8)..(8): Xaa in position 8 is any amino acid
  Variant (10)..(11): Xaa in position 10 to 11 is any or no amino acid
  Variant (13)..(14): Xaa in position 13 to 14 is any or no amino acid
  Variant (17)..(18): Xaa in position 17 to 18 is any amino acid
  Variant (19)..(19): Xaa in position 19 is Ala, Gly, Ser, Thr or Val
  Variant (20)..(25): Xaa in position 20 to 25 is any amino acid
  Variant (27)..(29): Xaa in position 27 to 29 is any amino acid
  Variant (30)..(30): Xaa in position 30 is Asp or Asn
  Variant (34)..(34): Xaa in position 34 is any amino acid
  Variant (35)..(35): Xaa in position 35 is Ile or Val
  Variant (36)..(37): Xaa in position 36 to 37 is any amino acid
ERXXGXFXRXXRXXLPXXXXXXXXXAXXXXGVLXXXXPK

SEQ ID NO: 9725 - protein, 16 aa, Artificial sequence
  protein pattern
  Variant (3)..(3): Xaa in position 3 is Lys or Arg
  Variant (6)..(7): Xaa in position 6 to 7 is any amino acid
  Variant (10)..(10): Xaa in position 10 is any amino acid
  Variant (11)..(11): Xaa in position 11 is Phe, Ile, Leu or Val
  Variant (12)..(13): Xaa in position 12 to 13 is any amino acid
  Variant (15)..(15): Xaa in position 15 is Ile, Leu, Met or Val
DWXETXXAHXXXXDXP

SEQ ID NO: 9726 - protein, 11 aa, Artificial sequence
  protein pattern
  Variant (2)..(2): Xaa in position 2 is Ile, Leu, Met or Val
  Variant (3)..(3): Xaa in position 3 is Lys or Arg
  Variant (7)..(8): Xaa in position 7 to 8 is any or no amino acid
  Variant (10)..(10): Xaa in position 10 is Glu, His, Lys or Arg
  Variant (11)..(11): Xaa in position 11 is Ile, Leu or Val
GXXKEEXXVXX

SEQ ID NO: 9727 - DNA, 1554 bp, Arabidopsis thaliana
  CDS (1)..(1554)
atggcgatggccatggctcttcgaaggctttcttcttcaattgacaaacccattcgtcctcttattcgatccacttcatgttacatgtcttctttgcccagtgaagctgttgatgagaaggaaagatctcgtgtcacttggccaaaacagcttaacgcacctttagaggaggttgatcctgagattgctgacattattgagcatgagaaagctagacaatggaagggacttgaacttattccatctgagaacttcacatctgtgtcggtgatgcaagctgttgggtctgtcatgactaacaaatacagtgaaggctatcctggtgccagatactatggaggaaatgagtatatagacatggcagaaaccttatgccagaagcgcgctcttgaagctttccggttagatcctgaaaagtggggagtgaatgttcaacctttgtctggatctcctgccaacttccatgtgtacactgcattgttaaagcctcatgaaagaatcatggcacttgatcttcctcatggtggtcatctttctcatggttatcagactgacaccaagaagatatcagctgtgtctatcttctttgaaacaatgccctatagattggacgagagcactggctacatcgactacgatcagatggagaaaagtgctactcttttcaggccaaaattgattgttgctggtgcaagtgcttatgctagattgtatgactatgcccgcatcagaaaggtctgtaacaagcaaaaagctgtaatgctagcagatatggcacacatcagtggtttggttgctgctaatgtaatcccttcaccgttcgactatgctgatgttgtaaccaccacaactcacaagtcacttcgtggaccccgtggagccatgattttcttcagaaagggtgttaaggaaattaacaagcaagggaaagaggttttgtatgattttgaagacaagatcaaccaagctgtcttccctggtcttcaaggtggtccacacaaccacactatcacaggactagctgttgctttgaaacaggcaactacttcagagtacaaagcataccaagaacaagtcctgagtaacagtgcaaagtttgctcagactctaatggagagaggatatgaacttgtttctggtggaactgacaaccatctggttctagtgaatctaaagcccaagggaattgatggatctagagttgagaaagtgttggaagctgttcacattgcatccaacaaaaacactgttcctggagatgtttctgccatggttcctggtggaatcagaatgggtactcctgctctcacttccagaggctttgttgaggaagactttgccaaagtagctgaatacttcgacaaagctgtgacaatagctctcaaagtcaaatctgaagctcaaggaaccaagttgaaggatttcgtgtcagcaatggaatcctcttcaaccatccaatccgagattgcgaaactgcgccatgaagtcgaggaattcgctaagcagttcccaacaattgggtttgagaaagaaaccatgaagtacaagaactaa

SEQ ID NO: 9728 - protein, 517 aa, Arabidopsis thaliana
MAMAMALRRLSSSIDKPIRPLIRSTSCYMSSLPSEAVDEKERSRVTWPKQLNAPLEEVDPEIADIIEHEKARQWKGLELIPSENFTSVSVMQAVGSVMTNKYSEGYPGARYYGGNEYIDMAETLCQKRALEAFRLDPEKWGVNVQPLSGSPANFHVYTALLKPHERIMALDLPHGGHLSHGYQTDTKKISAVSIFFETMPYRLDESTGYIDYDQMEKSATLFRPKLIVAGASAYARLYDYARIRKVCNKQKAVMLADMAHISGLVAANVIPSPFDYADVVTTTTHKSLRGPRGAMIFFRKGVKEINKQGKEVLYDFEDKINQAVFPGLQGGPHNHTITGLAVALKQATTSEYKAYQEQVLSNSAKFAQTLMERGYELVSGGTDNHLVLVNLKPKGIDGSRVEKVLEAVHIASNKNTVPGDVSAMVPGGIRMGTPALTSRGFVEEDFAKVAEYFDKAVTIALKVKSEAQGTKLKDFVSAMESSSTIQSEIAKLRHEVEEFAKQFPTIGFEKETMKYKN

SEQ ID NO: 9729 - DNA, 1826 bp, Zea mays subsp. mays
  CDS (78)..(1619)
actacctcccaaactcgcgagcgagtcgaggctccaaccccggcacatcacaggaggaggaggacgacgcgcccaccatggccatggcgacggccctccgcaagctctccgccaacgctctgcgccgccagccgctctcccgcatcacgccgctctactacatggcgtcccttccggcgacggaggagagatccggaatcacctggactaagcagttgaacgcgccgctggaagaggtcgaccccgagattgctgacatcatcgagcacgagaaggcccgccaatggaagggtctggagctcatcccgtcggagaatttcacgtcggtgtcagtgatgcaggcagttgggtcggtaatgaccaacaagtacagcgaggggtaccctggcgcaagatactacgggggaaatgagtttattgatatggcagagtccttgtgtcagaaacgtgctttggaggctttccgtttggacccggcgaaatggggagtgaatgtgcaacctctatccggttcgcccgccaacttccatgtatacactgcactcttgaagccacatgaaaggatcatggctttggatcttcctcacggtggacatctttctcatggttaccagactgacactaagaagatatctgcaacttcaatattttttgagacaatgccttacagattggatgaaagcactggattgattgattacgatcagttgaagaaaagcgctgttctttttaggccaaagttgatcattgccggtgcaagtgcatatgctcggctatatgattatgaccgtatgcggaagatatgcaccaagcagaaggcaatacttctagcagacatggcacatattagtgggcttgttgcagctggtgttgttccatctccttttgattatgcagatgtagtgactaccactactcacaaatcactccgtgggccacgtggagccatgatcttttacaggaagggagtcaaagaaataaataaacaaggaaaagaggttatgtatgattttgaggacaaaatcaatgctgctgtctttcctggtctgcaaggtgggcctcataaccataccattactggcttggctgttgcgctcaaacaggcaactactccagaatacagagcttaccaagagcaagttatcagtaattgtgctaaatttgcgcagagcctgatttcaaaaggatatgaactcgtctctggtgggactgacaaccatttagttctggtgaatctcaagaataaggggatagatggttcaagggtggagaaggttttagaaagtgtgcatattgcagcaaacaagaacacagttcctggtgatgtttcagctatggtgccaggaggcatcaggatgggaaccccagcccttacgtcgagaggatttgttgaagaagatttcgctaaagttgctgacttcttcgatgcagcagtgaatctggccttgaagattaaggctgcaacgacaggtggaacaaagctgaaggactttgttgccactttgcaatctgatagcatccaagttgagattgcaaagcttcgccatgatgtagaggaatttgcaaaacaattcccaacaattggatttgagaaagagaccatgaaatacaagaactaatatctggatgacaagaagagaatgaggtcactcttcttgcagtaagcattcgaagcaagatgccacgatgattattgggagtttaaccatggtgtaatggcatcttatgttaaagagatgttggcaatttacagcatgtggaactttcgtcaatcatattgtagacacataccgcgagatgctatattgaccggacaattgcatttc

SEQ ID NO: 9730 - protein, 513 aa, Zea mays subsp. mays
MAMATALRKLSANALRRQPLSRITPLYYMASLPATEERSGITWTKQLNAPLEEVDPEIADIIEHEKARQWKGLELIPSENFTSVSVMQAVGSVMTNKYSEGYPGARYYGGNEFIDMAESLCQKRALEAFRLDPAKWGVNVQPLSGSPANFHVYTALLKPHERIMALDLPHGGHLSHGYQTDTKKISATSIFFETMPYRLDESTGLIDYDQLKKSAVLFRPKLIIAGASAYARLYDYDRMRKICTKQKAILLADMAHISGLVAAGVVPSPFDYADVVTTTTHKSLRGPRGAMIFYRKGVKEINKQGKEVMYDFEDKINAAVFPGLQGGPHNHTITGLAVALKQATTPEYRAYQEQVISNCAKFAQSLISKGYELVSGGTDNHLVLVNLKNKGIDGSRVEKVLESVHIAANKNTVPGDVSAMVPGGIRMGTPALTSRGFVEEDFAKVADFFDAAVNLALKIKAATTGGTKLKDFVATLQSDSIQVEIAKLRHDVEEFAKQFPTIGFEKETMKYKN

SEQ ID NO: 9731 - DNA, 1803 bp, Oryza sativa
  CDS (1)..(1803)
atggatctctcgcggccggaatcgtcggacctgtcgctgggtttccactcgctcggccacgcccgcgggcacgcggtcacggggccgctgcggctgttcgatgacatggaggacgccaagccggagaagagcgtcggtggcggcggaggaggagggggaggaggaggcgaggaggaggatggggaggaagggggcgaccagcacttctccctcctcggccacgcgctctgcgtcaagcgtccacgccgcgcgctctacggaggcggaggcggaggcggggcaggaggtggaggaggaggaggaggggaggcgtcctcctgctcgtcttcctcctcgtcgctgcacccggcgaagcggcaggcgacggcggagcgcggcgcggatctggaggcccgccgcggcgccgtccgcgcgtggggcaaccaggcgctggcggaggccgacccggacgtgcacgcgctgatggagctcgagcgcgaccgccaggtgcgcgggatcgagctgatcgcgtcggagaacttcgtctgccgcgcggtgctcgaggcgctcggcagccacctcaccaacaagtactctgagggccatcccggggctcggtactatggcgggaaccagcacatcgacggcatcgagcgcctctgccatgagcgcgccctcgccgccttcggtctcgaccccgcctgctggggggtcaacgtccagccatactcctgcacctctgcaaacctagctgtttacacaggtctcctcctgcccaaggaccgtatcatggggctcgagccgccttccggtggccatgtcagccacgggtactacacaccaagtggtaagaaggtgtctggagcatccatattcttcgagagcttgtcgtacaaggtgaatccgcagactgggtatattgattacgacaagcttgaggagcgggcaatggatttccaccctaagattctcatatgtggtgggagctcataccccagggagtgggattttgcacggatgaggctcattgctgataagtgcggtgcggtgctcatgtgcgatatggcacatatcagcgggcttgttgcggccaaggaatgccgtagtccctttgattactgtgatgtggttacatcaactactcacaagaatctgagaggtcctagaggtggtataatatttttcaggagagggaaaaacttaaggaggcgtactggatctttttctcaagcggatgagaatgattatgacttcgaggacaggataaattttgcagttttcccttcaatgcaaggaggaccccataataatcatattgcagccttggcgataactctgaagcaagtagcaacacctgaatacaaagcatacatcatacaagttaagaaaaatgcccaagctttggcatcagccttactcagaagaaaatgcagattggttactggtggcaccgataaccacttggtactttgggacctcagaaatttaggcttgactggaaagaactttgagaaggtctgtgaggcatgccacatctccataaataagatgccgatatatggggataatggctcaatatctcctgggggtgttcggattggaacacctgcaatgactactagaggttgcttggaagatgactttgaggtgatcgcagatttcctcatcagagccacccaaatagctagtaatcttatgaaagaacatggaaaaatgcagaaggaattcctgagaggcctacagaacaataaagatatcatagaactccgtaaccaggttgagaattttgcatcgcagtttgcaatgccaggttttgatgtatga

SEQ ID NO: 9732 - protein, 600 aa, Oryza sativa
MDLSRPESSDLSLGFHSLGHARGHAVTGPLRLFDDMEDAKPEKSVGGGGGGGGGGGEEEDGEEGGDQHFSLLGHALCVKRPRRALYGGGGGGGAGGGGGGGGEASSCSSSSSSLHPAKRQATAERGADLEARRGAVRAWGNQALAEADPDVHALMELERDRQVRGIELIASENFVCRAVLEALGSHLTNKYSEGHPGARYYGGNQHIDGIERLCHERALAAFGLDPACWGVNVQPYSCTSANLAVYTGLLLPKDRIMGLEPPSGGHVSHGYYTPSGKKVSGASIFFESLSYKVNPQTGYIDYDKLEERAMDFHPKILICGGSSYPREWDFARMRLIADKCGAVLMCDMAHISGLVAAKECRSPFDYCDVVTSTTHKNLRGPRGGIIFFRRGKNLRRRTGSFSQADENDYDFEDRINFAVFPSMQGGPHNNHIAALAITLKQVATPEYKAYIIQVKKNAQALASALLRRKCRLVTGGTDNHLVLWDLRNLGLTGKNFEKVCEACHISINKMPIYGDNGSISPGGVRIGTPAMTTRGCLEDDFEVIADFLIRATQIASNLMKEHGKMQKEFLRGLQNNKDIIELRNQVENFASQFAMPGFDV

SEQ ID NO: 9733 - DNA, 1764 bp, Oryza sativa
  CDS (1)..(1764)
atgctcgatcgcgcgacgggggggcggcgccgcgccgcgggcgaagggatggaccatcggcccgacctgtccctcgccctccacccgccgccgccgcccgagggctcgtccgccgccgccgccgaggaggtgggggaggaggaggccgaaggcggcgaggggcggttctccctcatgggccagccgctcttcctcaagcggccgcggccgcggcccccgcgcccgccccgcgcgcgcggggtgggggacgacgtcgacgtcgacgtcgacgacgactcatccccgtgctgctcctcctcctgcctctcgcccgcggcgaagcggcgggcggcggcgggaggactcgaggcgcgccgcgcggccgtgcgcgcgtggggatgccagccgctcacggaggcggacccggacgtgcacgagctgatggagcgggagcggcgccggcaggcgggcggggtcgagctcatcgcctccgagaactacgcctgccgcgcggtgctcgacgcgctcggcagccacctcaccaacaagtactccgagggcctccccggcgcgcgctactactgcggcaaccagcacatcgacgccatcgagcgcctctgctgcgaccgcgcgctcgccgccttcggcctcgacccgtcgcgctggggcgtcaacgtgcagccctactcctgcacctccgccaacttcgccgtctacacggggctcctcctccccaacgacaggatcatgggcctcgactcgccgtccggcggccacgtcagccacgggtactacacgcccagcggcaagaaggtctccggcgcctccatcttcttcgagaacctctcctacagggtgaacccgcacaccgggtacatcgattacgataaggtagaggagaaggccgtggatttccaccccaagattctcatctgcggcgcgagctcgtatccaagggattgggactatgcacggatgcggcttgttgctgataagtgcggcgcagtactcatgtgtgacatggcacaaatcagtggtcttgtggcagcgaaggaatgtcgaaatccctttgactactgcgatattgttacttcaaccacacacaagagcttgaggggtcctagaggtggtataatatttttcaggaaagggaaaaatctaaggaaacgggtcggatctttaactcaagtggttgaaaatgatcagtatgattttgaggaccgtataaattttgctgttttcccttcaatgcaaggtggaccccacaataaccatattgctgctctggctatagctctaaaacaagtagccatgccagaattcaaagcatacattcaacaagtcaagaaaaatgcccaagctttggcgatggccttgctcaggaggaaatgcagactggttactggtggcacagataatcatttgatgctctgggacctaagaacatttggcttgacagggaagaactttgagaaggtctgtgaggcatgtcatatctctcttaataaaacaccaatatatggagataatggttcgatttctcctggaggtgtgcggattggaactcctgccatgacaactagaggttgcttggagagtgactttgagataatggcagaattccttttgagggcagcacatatagcaagtattgttttgaaggagcatggaaggcttcagaaggattttctgaaaggtctggagaacaataatgacattattgaactccggaatcaggtggagacatttgccttacaatttgccatgccgggatttgatgtataa

SEQ ID NO: 9734 - protein, 587 aa, Oryza sativa
MLDRATGGRRRAAGEGMDHRPDLSLALHPPPPPEGSSAAAAEEVGEEEAEGGEGRFSLMGQPLFLKRPRPRPPRPPRARGVGDDVDVDVDDDSSPCCSSSCLSPAAKRRAAAGGLEARRAAVRAWGCQPLTEADPDVHELMERERRRQAGGVELIASENYACRAVLDALGSHLTNKYSEGLPGARYYCGNQHIDAIERLCCDRALAAFGLDPSRWGVNVQPYSCTSANFAVYTGLLLPNDRIMGLDSPSGGHVSHGYYTPSGKKVSGASIFFENLSYRVNPHTGYIDYDKVEEKAVDFHPKILICGASSYPRDWDYARMRLVADKCGAVLMCDMAQISGLVAAKECRNPFDYCDIVTSTTHKSLRGPRGGIIFFRKGKNLRKRVGSLTQVVENDQYDFEDRINFAVFPSMQGGPHNNHIAALAIALKQVAMPEFKAYIQQVKKNAQALAMALLRRKCRLVTGGTDNHLMLWDLRTFGLTGKNFEKVCEACHISLNKTPIYGDNGSISPGGVRIGTPAMTTRGCLESDFEIMAEFLLRAAHIASIVLKEHGRLQKDFLKGLENNNDIIELRNQVETFALQFAMPGFDV

SEQ ID NO: 9735 - DNA, 1596 bp, Oryza sativa
  CDS (1)..(1596)
atggcgatggcttcgcaccacctcgcccagccgcccacgcgcgcggctctctcctcgcgccccacctacccgctctccagccatcaccactcctcccgtctccagctcccgctcgtcagcggggcgcggcgcagcaggctgtcccccgcggtggcgacgtccccggtcgccgccccagcgatggacgccgtggccgactgggggctgaccactctggaggaggctgacccggaggtgtacgacctcgtcgagcgcgagaagcggcggcagcgcgcgggcgtcgagctcatcgcgtcggagaacttcacctcgctcgccgtcatggaggcgctgggctcgccgctcaccaacaagtactccgagggcatgccggggtcccgctactacggaggcaacgaggtcatcgacgaggtggaggagctctgccgcgcccgcgcgctcgccgccttccacctcgaccccgaggcctggggcgtcaacgtgcagccctactccggctcgccggcgaacttcgccgcctacaccgggctgctccaaccccacgagcggatcatggggctcgatttgccgtccggcggccacctcacgcacggctactacaccgccggcggcaaaaagatctccgccacgtccatctacttcgagagcctgccgtacaaggtgagctccgagacaggatacgtcgattatgataagctggaggagaaggccatggattttcggcccaagctcatcatctgcggcgggagcgcgtacccgcgggattgggattacgccaggttcagggccatcgcggataagtgcggcgccatgttgctctgcgacatggctcacatcagtggcctagttgccgcgcaggaggctgcaaatccttttcaatattctgatgtggttaccaccaccacccacaagagtctccgagggccaagatctggtatgatcttctacaggaagggcctgaagcctcccaagaaaggccagcctgagggcgctctgtatgactacgaggacaggatcaacttcgcagtgtttccgtcgctccaagggggccctcacaaccaccaaattgctgcgctagcggttggtttgaagcagactatgtcacctggattcaagtcttatattaagcaggtcaaggccaatgctgttgcccttggtaaccatttgatgagtaagggctacaaattggttactgacggaacagagaaccatcttgttctctgggatctgcgccctcttggcttgactggtaacaaagttgagaaggtctgtgatttgtgcagcattacactgaacaaaaatgctgtctttggggatagcagtgcaatgtcacctggtggtgtccgcattggtacacctgccatgacatcaaggggtttggtagaggaggactttgtacagatcgccgagttccttcaccaggcagtgaccatctgcttggatgttcagaaggagcgtggcaagcttctcaagtacttcaacgagggcctggagaacaacaaggacattgaggacctcagggcggaggtggagaagtttgccacttcattcgagatgcctggcttcagggtatccgacatgaagtacaaggattag

SEQ ID NO: 9736 - protein, 531 aa, Oryza sativa
MAMASHHLAQPPTRAALSSRPTYPLSSHHHSSRLQLPLVSGARRSRLSPAVATSPVAAPAMDAVADWGLTTLEEADPEVYDLVEREKRRQRAGVELIASENFTSLAVMEALGSPLTNKYSEGMPGSRYYGGNEVIDEVEELCRARALAAFHLDPEAWGVNVQPYSGSPANFAAYTGLLQPHERIMGLDLPSGGHLTHGYYTAGGKKISATSIYFESLPYKVSSETGYVDYDKLEEKAMDFRPKLIICGGSAYPRDWDYARFRAIADKCGAMLLCDMAHISGLVAAQEAANPFQYSDVVTTTTHKSLRGPRSGMIFYRKGLKPPKKGQPEGALYDYEDRINFAVFPSLQGGPHNHQIAALAVGLKQTMSPGFKSYIKQVKANAVALGNHLMSKGYKLVTDGTENHLVLWDLRPLGLTGNKVEKVCDLCSITLNKNAVFGDSSAMSPGGVRIGTPAMTSRGLVEEDFVQIAEFLHQAVTICLDVQKERGKLLKYFNEGLENNKDIEDLRAEVEKFATSFEMPGFRVSDMKYKD

SEQ ID NO: 9737 - DNA, 1587 bp, Oryza sativa
  CDS (1)..(1587)
atggcgatggcttcgcaccacctcgcccagccgcccacgcgcgcggctctctcctcgcgccccacctacccgctctccagccatcaccactcctcccgtctccagctcccgctcgtcagcggggcgcggcgcagcaggctgtcccccgcggtggcgacgtccccggtcgccgccccagcgatggacgccgtggccgactgggggctgaccactctggaggaggctgacccggaggtgtacgacctcgtcgagcgcgagaagcggcggcagcgcgcgggcgtcgagctcatcgcgtcggagaacttcacctcgctcgccgtcatggaggcgctgggctcgccgctcaccaacaagtactccgagggcatgccggggtcccgctactacggaggcaacgaggtcatcgacgaggtggaggagctctgccgcgcccgcgcgctcgccgccttccacctcgaccccgaggcctggggcgtcaacgtgcagccctactccggctcgccggcgaacttcgccgcctacaccgggctgctccaaccccacgagcggatcatggggctcgatttgccgtccggcggccacctcacgcacggctactacaccgccggcggcaaaaagatctccgccacgtccatctacttcgagagcctgccgtacaaggtgagctccgagacaggatacgtcgattatgataagctggaggagaaggccatggattttcggcccaagctcatcatctgcggcgggagcgcgtacccgcgggattgggattacgccaggttcagggccatcgcggataagtgcggcgccatgttgctctgcgacatggctcacatcagtggcctagttgccgcgcaggaggctgcaaatccttttcaatattctgatgtggttaccaccaccacccacaagagtctccgagggccaagatctggtatgatcttctacaggaagggcctgaagcctcccaagaaaggccagcctgagggcgctctgtatgactacgaggacaggatcaacttcgcagtgtttccgtcgctccaagggggccctcacaaccaccaaattgctgcgctagcggttggtttgaagcagactatgtcacctggattcaagtcttatattaagcaggtcaaggccaatgctgttgcccttggtaaccatttgatgagtaagggctacaaattggttactgacggaacagagaaccatcttgttctctgggatctgcgccctcttggcttgactgttgagaaggtctgtgatttgtgcagcattacactgaacaaaaatgctgtctttggggatagcagtgcaatgtcacctggtggtgtccgcattggtacacctgccatgacatcaaggggtttggtagaggaggactttgtacagatcgccgagttccttcaccaggcagtgaccatctgcttggatgttcagaaggagcgtggcaagcttctcaagtacttcaacgagggcctggagaacaacaaggacattgaggacctcagggcggaggtggagaagtttgccacttcattcgagatgcctggcttcagggtatccgacatgaagtacaaggattag

SEQ ID NO: 9738 - protein, 528 aa, Oryza sativa
MAMASHHLAQPPTRAALSSRPTYPLSSHHHSSRLQLPLVSGARRSRLSPAVATSPVAAPAMDAVADWGLTTLEEADPEVYDLVEREKRRQRAGVELIASENFTSLAVMEALGSPLTNKYSEGMPGSRYYGGNEVIDEVEELCRARALAAFHLDPEAWGVNVQPYSGSPANFAAYTGLLQPHERIMGLDLPSGGHLTHGYYTAGGKKISATSIYFESLPYKVSSETGYVDYDKLEEKAMDFRPKLIICGGSAYPRDWDYARFRAIADKCGAMLLCDMAHISGLVAAQEAANPFQYSDVVTTTTHKSLRGPRSGMIFYRKGLKPPKKGQPEGALYDYEDRINFAVFPSLQGGPHNHQIAALAVGLKQTMSPGFKSYIKQVKANAVALGNHLMSKGYKLVTDGTENHLVLWDLRPLGLTVEKVCDLCSITLNKNAVFGDSSAMSPGGVRIGTPAMTSRGLVEEDFVQIAEFLHQAVTICLDVQKERGKLLKYFNEGLENNKDIEDLRAEVEKFATSFEMPGFRVSDMKYKD

SEQ ID NO: 9739 - DNA, 1416 bp, Glycine max
  CDS (1)..(1416)
atggatccagtgagcgtgtggggtaacacgcccttggcgacggtggatcccgagatccatgacctcatcgagaaggagaagcaccgccaatgccgcggcatcgagctcatcgcctccgagaacttcacctccttcgcagtcatcgaggccctcggcagcgccctcaccaacaaatactccgagggcatgcccggcaaccgctactacggcggcaacgaattcatcgaccagatcgaaaacctctgccgctcacgcgccctccaggccttccacctcgacgcccaatcctggggcgtcaatgtgcagccctactccggctcccctgccaacttcgccgcctacaccgccgtcctcaacccccacgaccgcatcatggggctggatctcccctccggcggccacctcacccacggctactacacctccggcggcaagaagatctccgccacctccatttacttcgagagcctcccttacaaagtaaactccaccaccggctacatcgactacgaccgcttggaggaaaaagccctagacttcaggcccaaattgataatctgcggtggcagcgcttaccctcgcgattgggactacaaacgcttcagggaaattgcggataagtgcggggcattgcttctctgcgacatggcgcacactagcggccttgtggccgcgcaggaagtgaacagccccttcgagtattgcgacattgtgaccaccaccacgcataagagcttgcggggtccacgggcggggatgatcttttaccggaagggcccgaagccgccgaagaaggggcagccggagaacgcggtttatgatttcgaggacaagatcaactttgcggtgttcccttcgctgcagggtgggccccacaaccaccagatcggggctcttgccgtggcgctgaagcaggccgcgtcgcccgggtttaaggcctacgccaagcaggttaaggccaacgccgttgcgcttgggaattacttgatggggaaagggtacagtcttgtcactggaggcacggagaaccatcttgtcttgtgggatctcagacctcttggattgactgggaataaggtggagaaactctgtgatctctgcaacattactgttaataagaacgcagtttttggtgatagcagtgccttggcccccggtggagtgcgaattggggcccctgccatgacttctaggggtttggttgaaaaggactttgagcagattggtgagttccttcaccgtgctgtgactctcacactggagatccagaaggagcatggcaaacttctcaaggatttcaacaagggcctcgtcaacaacaaggccattgaagatctcaaagctgatgttgagaagttctctgccacatttgacatgcctggcttcctggtatctgaaatgaagtacaaggattag

SEQ ID NO: 9740 - protein, 471 aa, Glycine max
MDPVSVWGNTPLATVDPEIHDLIEKEKHRQCRGIELIASENFTSFAVIEALGSALTNKYSEGMPGNRYYGGNEFIDQIENLCRSRALQAFHLDAQSWGVNVQPYSGSPANFAAYTAVLNPHDRIMGLDLPSGGHLTHGYYTSGGKKISATSIYFESLPYKVNSTTGYIDYDRLEEKALDFRPKLIICGGSAYPRDWDYKRFREIADKCGALLLCDMAHTSGLVAAQEVNSPFEYCDIVTTTTHKSLRGPRAGMIFYRKGPKPPKKGQPENAVYDFEDKINFAVFPSLQGGPHNHQIGALAVALKQAASPGFKAYAKQVKANAVALGNYLMGKGYSLVTGGTENHLVLWDLRPLGLTGNKVEKLCDLCNITVNKNAVFGDSSALAPGGVRIGAPAMTSRGLVEKDFEQIGEFLHRAVTLTLEIQKEHGKLLKDFNKGLVNNKAIEDLKADVEKFSATFDMPGFLVSEMKYKD

SEQ ID NO: 9741 - DNA, 1692 bp, Glycine max
  CDS (1)..(1692)
atggacctctctcaccctcagtctaacttgtccctcggattttcttcctcccacgcttcgccgcctcctcgctccgacccgccggtgccgctgcagctcatggaaccgcagacggagaatggcaacttagatgttgaatcggacgacgatgaggacaaagaagtcgaggagtttcgcattctaggccactcaatgtgcctcaagaggcgaagagattgcgactcctcatcctcctcctccgccgccaagagggtttccgtcgagcccgatctcgacgcgcgtaaggcagcggtgcgcgcgtggggttgccaacccctctccatcgcggaccccgacgtccacgagataatggaaaaagagaagaaacgtcaatttcgcgggattgaactcatagcctccgagaatttcgtgtgcagagccgtgatggaagcgttgggaagccacttgacgaacaagtactctgagggaatgcccggtgcgcgctactacggcgggaaccagtacatcgacgaaatcgaaacgctctgttgcgaacgtgctttgaacgcgttcggtctcgaccccaagtgttggggagtgaacgtgcagccatattcgtgcacatctgctaattttgctgtttacacggggttgttgctgcccggtgatcgtatcatggggttggatactccttctggagggaacactagtcacggttactatactcccaatgggaagaaagtttctggggcttccattttctttgagagcttgccctacaaggtgaaccctcaaacgggttatattgattacgataagcttgaggaaagggcgcttgattttcgccccaagatacttatttgtggtgggagctcctaccctcgagagtgggattatgcgaggtttaggcacattgcggataagtgtggagctgtgttgttgtgtgacatggcacagattagtggcataattgcagccaaggagtgtgtgaatccttttgattattgtgacattgttacttcgacaactcacaagagtcttcgaggtccaaggggaggcataattttttatcgaaagggtacaaagccaaggaagagagggatacttctaagtcagggacatgaaagtgatcaatatgactttgaagaaaagataaattttgctgtttttccatcaatgcaaggggggccacacaataaccacattgctgcacttgctatagctttaaaacaagtcgctactcctgagtataaggcatacatgcagcaggtgaagaagaatgctcaagctttagcatgtgctttactgagaagaaaatgccgtctagtaactgggggtacagacaaccatctaatactttgggatttaaggcccctgggattgacaggtaaattttatgagaaggtctgtgaaacatgtcatattactttgaataaaattgctatttttggcgacaatggaactataattcctggaggtgtaagagtaggtacccctgccatgacgtcaagaggatgtctggaagctcattttgagacaatggctgaatttctcattagagctgcacaaattgcaagcatactgcagagggagcatgggaaattgcagaagacaacattgaagggacttgagagcaatagagacgtcgttgagctccgggcacgggttgaagcttttgcaactcagtttgccatgccgggttttgacatttga

SEQ ID NO: 9742 - protein, 563 aa, Glycine max
MDLSHPQSNLSLGFSSSHASPPPRSDPPVPLQLMEPQTENGNLDVESDDDEDKEVEEFRILGHSMCLKRRRDCDSSSSSSAAKRVSVEPDLDARKAAVRAWGCQPLSIADPDVHEIMEKEKKRQFRGIELIASENFVCRAVMEALGSHLTNKYSEGMPGARYYGGNQYIDEIETLCCERALNAFGLDPKCWGVNVQPYSCTSANFAVYTGLLLPGDRIMGLDTPSGGNTSHGYYTPNGKKVSGASIFFESLPYKVNPQTGYIDYDKLEERALDFRPKILICGGSSYPREWDYARFRHIADKCGAVLLCDMAQISGIIAAKECVNPFDYCDIVTSTTHKSLRGPRGGIIFYRKGTKPRKRGILLSQGHESDQYDFEEKINFAVFPSMQGGPHNNHIAALAIALKQVATPEYKAYMQQVKKNAQALACALLRRKCRLVTGGTDNHLILWDLRPLGLTGKFYEKVCETCHITLNKIAIFGDNGTIIPGGVRVGTPAMTSRGCLEAHFETMAEFLIRAAQIASILQREHGKLQKTTLKGLESNRDVVELRARVEAFATQFAMPGFDI

SEQ ID NO: 9743 - DNA, 1545 bp, Glycine max
  CDS (1)..(1545)
atggccatggctcttcctcttcgcagactctcctccaccctcaacaaacctctcgccagcgctacttccatttatcatcgcatgtcctcctcgctctccgctcaggagaaagacaaatctcgcgccgattggataaagcagctcaacgatcctctcgagaccatcgatcccgagatcgctgacataatcgaactcgaaaaagcgcgtcaatggaaggggttcgaacttataccttcggagaatttcacgtcgctgtcggtgatgcaagccgttggatcggtgatgacgaataaatacagcgaaggatatcccggtgctagatactatggaggaaatgagtatattgacatggctgagaccttgtgtcagaagcgtgcacttgaagcttttcggctggatccagcaaaatggggagtcaatgtgcaatcattatctggatccccttctaacttccaagtttacactgctttattgaaacctcatgagagaattatggcacttgatcttccccatggtgggcatctgtcgcatggttatcagactgacaccaagaagatatcagctgtatctatattttttgaaacaatgccatacagattgaatgagagcactggttatatcgattatgaccagttggagaaaagtgcagtactttttaggccaaaattaatagttgctggtgctagtgcttatgctcgcctttatgattatgcacgtgttcgcaaggtctgtgataagcagaaggcagttctgttggctgatatggcacatatcagtggattggttgctgcaggtgttattccttctccttttgattatgcagatgttgtaacaaccacaacacataagtcacttcgtggaccacgtggggctatgattttcttcaggaagggtgtgaaagagataaacaaacaagggaaggaagtgttgtatgactatgaagacagaataaatcaggctgtttttcctggacttcaaggtggtccacacaatcacactatttctggcttagcagttgcactgaagcaggctatgacaccagaattcaagaattaccaaaagcaagtacttagcaactgctcagcatttgcacagagtttgttagagaaaggctacgaacttgtatctggtggaactgacaaccatttagtgttagtgaacttaagaaacaagggcattgatggttctagggttgagaaggtactggaagcagttcatatagctgccaataaaaatactgttccaggggatgtgtctgctatggttcctggaggcattcgaatgggaacccctgctctcacatctaggggatttgttgaggaagatttcgaaaaagtagctgaatactttgatgcagctgtcaagttagccttgcagattaaggaaaacaccaatggtacaaagttgaaggattttgtggcagctatgcaatcagatgaacaagttcaatctaagattgctaatctccgtcatgaagtagaggattatgctaagcagtttcccacaattggttttgacatagaaacaatgaagtatggcaaatga

SEQ ID NO: 9744 - protein, 514 aa, Glycine max
MAMALPLRRLSSTLNKPLASATSIYHRMSSSLSAQEKDKSRADWIKQLNDPLETIDPEIADIIELEKARQWKGFELIPSENFTSLSVMQAVGSVMTNKYSEGYPGARYYGGNEYIDMAETLCQKRALEAFRLDPAKWGVNVQSLSGSPSNFQVYTALLKPHERIMALDLPHGGHLSHGYQTDTKKISAVSIFFETMPYRLNESTGYIDYDQLEKSAVLFRPKLIVAGASAYARLYDYARVRKVCDKQKAVLLADMAHISGLVAAGVIPSPFDYADVVTTTTHKSLRGPRGAMIFFRKGVKEINKQGKEVLYDYEDRINQAVFPGLQGGPHNHTISGLAVALKQAMTPEFKNYQKQVLSNCSAFAQSLLEKGYELVSGGTDNHLVLVNLRNKGIDGSRVEKVLEAVHIAANKNTVPGDVSAMVPGGIRMGTPALTSRGFVEEDFEKVAEYFDAAVKLALQIKENTNGTKLKDFVAAMQSDEQVQSKIANLRHEVEDYAKQFPTIGFDIETMKYGK

SEQ ID NO: 9745 - DNA, 1557 bp, Glycine max
  CDS (1)..(1557)
atggcgatggcaatggcgcttcgcaggctttcatcttcaattgacaagcctctgcgccctctcttcaatgccggttccctctactacaagtcgtctttgcctgatgaagctgtttacgacaaggagcgacccggagttacatggccgaagcagttgaatgctccacttgaggtcgtggatcctgagattgctgatattattgagcttgagaaagctaggcaatggaaggggctagaattgataccgtcagagaatttcacctctgtgtctgtgatgcaagcggttggatcggttatgaccaacaaatacagtgaggggtaccctggtgcaagatattatggtggaaatgagtatattgacatggctgaaacactgtgccaaaagcgtgccctagaagcttttagattggatcccgctaaatggggagtgaacgtgcagcctctgtcagggtctcctgcaaatttccacgtttacactgcattgcttaaacctcatgaaagaatcatggcacttgatcttcctcatggtggccatctttctcacggatatcagactgataccaaaaagatatctgcagtctcgatattttttgagacaatgccatatcgattgaatgaaagtacaggatacatcgactatgaccagatggagaaatctgctacactcttcaggccaaaattaattgttgctggagctagcgcttatgcacgtctctatgattatgaacgtgtacgcaaggtttgcgataaacagaaagctatactattggcagatatggcacacatcagtggattggttgcagctggtgtcatcccatcaccttttgattatgctgatgtagttactaccacaactcacaagtcacttcgaggaccacgtggagctatgatattctacagaaaaggggttaaagaaattaacaaacaaggaaaagaggtattgtatgactacgaagacaaaatcaaccaagctgttttccctggactgcaaggtggccctcacaaccacactattactggtttagctgttgcgttgaagcaggccactactcccgaatatagagcatatcaagagcaagttctcagcaacagctttaaatttgcacaggctctgagtgagagaagctatgagcttgtctctggtggaaccgagaatcacctggttttggtgaatctgaagaataagggtattgatggctccagagttgagaaggtgttggaagcagttcatattgcagctaataaaaacactgttcctggagatgtgtctgccatggttcctggtggcatcaggatgggaacccctgctcttacttctagaggatttgttgaggaggattttgtcaaggtagcagagttttttgatgcagcagtgaagatagctgtgaagattaagggagagagcaaaggaacaaagctgaaggacttcttggccacaattgagtcatcttctacctttcaatcggagatagcaaagctccgccttgatgttgaggagtatgcaaaacaatttccaaccattggttttgataaagcaaccatgaagcacaagaattga

SEQ ID NO: 9746 - protein, 518 aa, Glycine max
MAMAMALRRLSSSIDKPLRPLFNAGSLYYKSSLPDEAVYDKERPGVTWPKQLNAPLEVVDPEIADIIELEKARQWKGLELIPSENFTSVSVMQAVGSVMTNKYSEGYPGARYYGGNEYIDMAETLCQKRALEAFRLDPAKWGVNVQPLSGSPANFHVYTALLKPHERIMALDLPHGGHLSHGYQTDTKKISAVSIFFETMPYRLNESTGYIDYDQMEKSATLFRPKLIVAGASAYARLYDYERVRKVCDKQKAILLADMAHISGLVAAGVIPSPFDYADVVTTTTHKSLRGPRGAMIFYRKGVKEINKQGKEVLYDYEDKINQAVFPGLQGGPHNHTITGLAVALKQATTPEYRAYQEQVLSNSFKFAQALSERSYELVSGGTENHLVLVNLKNKGIDGSRVEKVLEAVHIAANKNTVPGDVSAMVPGGIRMGTPALTSRGFVEEDFVKVAEFFDAAVKIAVKIKGESKGTKLKDFLATIESSSTFQSEIAKLRLDVEEYAKQFPTIGFDKATMKHKN

SEQ ID NO: 9747 - DNA, 1584 bp, Glycine max
  CDS (1)..(1584)
atgcaggcttgtacaacgatgagttctttgcagcaacaacctatttggaccaaagggttaaatttccctgcaaaagggtatggcagcaataacgggtttctacctcaggtgaggttctgcaatattaagccatccaaagcttctcatgttgaagcaagtttagtcactgggaagccgtcatctgtgcctttctctgtgcctgaaattggaggcgacggaagtagcttcctggactatggcttgagtgaagctgatcctgatgttcgtgcaattattgacaaggaaaaggaccgacaatttaaaagtcttgagcttattgcttctgagaattttacatctagagcagtgatggaagcagttgggtcgtgcctcacaaacaagtactcagaaggattgccgggtaaaaggtactatggtggcaatgagtacattgatgagcttgaaatcctatgtcaacaaagggcactggctgcatttcatgtagatgaaaacaaatggggtgttaatgttcaaactttatctggttcccctgctaattttgcagtatacactgcagttcttaaaccacatgatcggataatgggtttggacttgcctcacggaggacatttgtctcatggattcatgacacccaaaaaacgtgtatcagccacatcaatttattttgaatctatgccttatcgacttgatgaatcaacaggtcttattgattatgatatgctggagaaaactgctactctgtttcgtccaaaactcattgttgctggtgctagtgcttatcctcgggacattgactaccctcgtatgagaaaaattgcagatgaagtaggtgcttttcttatgatggatatggctcatataagtgggcttgttgctgcatctgtactttctaatccctttgagtattgtgatattgtgaccaccacaacccacaagtctttacgaggtccaagaggtggtatgatattcttcaagaaagatactgtgcatggggttgatttggagcctgccattaacaatgctgtttttcctggtctacaggggggtcctcataaccacacaattggaggactagcagtttgcttgaagtatgctcagtctccagaatttaaaaattatcaaaatcaggtggttgctaactgtagagctcttgctaagcgattaattgagcatggatataaactggtttctggtggtagtgacaatcacctggttcttgtcgatctaaggccatctggtcttgatggtgctcgggtggagaaaattcttgacttggcttctataaccctcaacaaaaattcagtgcctggtgataagagtgccctagttccaggaggcattcgcattggggcaccagcaatgacaacaagaggacttggtgagaaagaattttcactcattgctgatttcattcatgagggtgtgcaaataagtcttgaagccaaaagtttggtctcaggaacgaagctccaagattttttgaagtttgtaacatcttctgaatttcctttgggagagaaggtatcagagttgcgtaggaaagttgaagctcttactactcagtatccaatacccggagtctaa

SEQ ID NO: 9748 - protein, 527 aa, Glycine max
MQACTTMSSLQQQPIWTKGLNFPAKGYGSNNGFLPQVRFCNIKPSKASHVEASLVTGKPSSVPFSVPEIGGDGSSFLDYGLSEADPDVRAIIDKEKDRQFKSLELIASENFTSRAVMEAVGSCLTNKYSEGLPGKRYYGGNEYIDELEILCQQRALAAFHVDENKWGVNVQTLSGSPANFAVYTAVLKPHDRIMGLDLPHGGHLSHGFMTPKKRVSATSIYFESMPYRLDESTGLIDYDMLEKTATLFRPKLIVAGASAYPRDIDYPRMRKIADEVGAFLMMDMAHISGLVAASVLSNPFEYCDIVTTTTHKSLRGPRGGMIFFKKDTVHGVDLEPAINNAVFPGLQGGPHNHTIGGLAVCLKYAQSPEFKNYQNQVVANCRALAKRLIEHGYKLVSGGSDNHLVLVDLRPSGLDGARVEKILDLASITLNKNSVPGDKSALVPGGIRIGAPAMTTRGLGEKEFSLIADFIHEGVQISLEAKSLVSGTKLQDFLKFVTSSEFPLGEKVSELRRKVEALTTQYPIPGV

SEQ ID NO: 9749 - DNA, 1380 bp, Glycine max
  CDS (1)..(1380)
atggccatggctcttcgcagactcaacaaacctttctccaacgccacttccatttatcgccagtcctcttcgctctccgctcacgaaaaacacaaatctcgcgccgattggataaagcagctcaacgatcctctcgaggccatcgatcccgagatcgccgacataatcgaactcgaaaaggcgcgtcaatggaaggggttcgaacttataccttcggaaaatttcacgtcgctgtcggtgatgcaagcagttggatcggtgatgacgaataaatacagtgaaggatatcctggtgctagatactatggaggaaacgaatacattgacatggctgagaccttgtgtcagaagcgtgcacttgaagcttttcagctggatccagcaaaatggggagtcaatgtgcaatcattatctggatccccttctaacttccaagtttacactgctttattgaaacctcatgagagaattatggcacttgatcttccccatggtgggcatctatcgcatggttatcagactgacaccaagaagatatcggctgtatctatattctttgaaacaatgccatacagattgaatgagagcactggttatatcgattatgaccagttggagaaaagtgcagcactttttaggccaaaattaatagttgctggtgctagtgcttatgctcgcctttatgattatgcacgtgttcgcaaggtctgtgataagcagaaggcagttctgttggctgatatggcacatatcagtggattggttgctgccggtgttattccttctccttttgattatgcagatgttgtaacaaccacgacacataagtcacttcgtggaccacgtggggctatgattttcttcaggaagggtgtgaaagagataaacaaacaagggaaggaagtgttgtatgactatgaagacaaaataaaccaggctgtttttcctggacttcaaggtggtccacacaatcacactatttcaggcttagcagttgcactgaagcaggctatgacaccagaattcaagaattaccaaaagcaagtacttagcaactgctcagcatttgcacagagtttgttagaaaaaggctacgaacttgtatctggtggaactgacaaccatttagtgttggtgaacttaagaaacaagggtattgatggttctagggttgagaaggtactggaagcagttcatatagctgccaataaaaataccgttccaggggatgtgtctgctatggttcctggaggcattcgaatgggaacccctgctctcacatctaggggatttgttgaggaagattttgaaaaagtagctgaatactttgatgcggctgtcaagttagccttgcagattaaggaaaataccaatggttga

SEQ ID NO: 9750 - protein, 459 aa, Glycine max
MAMALRRLNKPFSNATSIYRQSSSLSAHEKHKSRADWIKQLNDPLEAIDPEIADIIELEKARQWKGFELIPSENFTSLSVMQAVGSVMTNKYSEGYPGARYYGGNEYIDMAETLCQKRALEAFQLDPAKWGVNVQSLSGSPSNFQVYTALLKPHERIMALDLPHGGHLSHGYQTDTKKISAVSIFFETMPYRLNESTGYIDYDQLEKSAALFRPKLIVAGASAYARLYDYARVRKVCDKQKAVLLADMAHISGLVAAGVIPSPFDYADVVTTTTHKSLRGPRGAMIFFRKGVKEINKQGKEVLYDYEDKINQAVFPGLQGGPHNHTISGLAVALKQAMTPEFKNYQKQVLSNCSAFAQSLLEKGYELVSGGTDNHLVLVNLRNKGIDGSRVEKVLEAVHIAANKNTVPGDVSAMVPGGIRMGTPALTSRGFVEEDFEKVAEYFDAAVKLALQIKENTNG

SEQ ID NO: 9751 - DNA, 1524 bp, Glycine max
  CDS (1)..(1524)
atggccatggctcttcgcagactcaacaaacctttctccaacgccacttccatttatcgccagtcctcttcgctctccgctcacgaaaaacacaaatctcgcgccgattggataaagcagctcaacgatcctctcgaggccatcgatcccgagatcgccgacataatcgaactcgaaaaggcgcgtcaatggaaggggttcgaacttataccttcggaaaatttcacgtcgctgtcggtgatgcaagcagttggatcggtgatgacgaataaatacagtgaaggatatcctggtgctagatactatggaggaaacgaatacattgacatggctgagaccttgtgtcagaagcgtgcacttgaagcttttcagctggatccagcaaaatggggagtcaatgtgcaatcattatctggatccccttctaacttccaagtttacactgctttattgaaacctcatgagagaattatggcacttgatcttccccatggtgggcatctatcgcatggttatcagactgacaccaagaagatatcggctgtatctatattctttgaaacaatgccatacagattgaatgagagcactggttatatcgattatgaccagttggagaaaagtgcagcactttttaggccaaaattaatagttgctggtgctagtgcttatgctcgcctttatgattatgcacgtgttcgcaaggtctgtgataagcagaaggcagttctgttggctgatatggcacatatcagtggattggttgctgccggtgttattccttctccttttgattatgcagatgttgtaacaaccacgacacataagtcacttcgtggaccacgtggggctatgattttcttcaggaagggtgtgaaagagataaacaaacaagggaaggaagtgttgtatgactatgaagacaaaataaaccaggctgtttttcctggacttcaaggtggtccacacaatcacactatttcaggcttagcagttgcactgaagcaggctatgacaccagaattcaagaattaccaaaagcaagtacttagcaactgctcagcatttgcacagagtttgttagaaaaaggctacgaacttgtatctggtggaactgacaaccatttagtgttggtgaacttaagaaacaagggtattgatggttctagggttgagaaggtactggaagcagttcatatagctgccaataaaaataccgttccaggggatgtgtctgctatggttcctggaggcattcgaatgggaacccctgctctcacatctaggggatttgttgaggaagattttgaaaaagtagctgaatactttgatgcggctgtcaagttagccttgcagattaaggaaaataccaatggtacaaagttgaaagattttgtggcagctatgcaatcagatgaacaaattcaatctaagattgctaatctctgtcatgaagttgaggattatgctaagaagtttcccactattggttttaacatagaaacaatgaagtatggtaagtga

SEQ ID NO: 9752 - protein, 507 aa, Glycine max
MAMALRRLNKPFSNATSIYRQSSSLSAHEKHKSRADWIKQLNDPLEAIDPEIADIIELEKARQWKGFELIPSENFTSLSVMQAVGSVMTNKYSEGYPGARYYGGNEYIDMAETLCQKRALEAFQLDPAKWGVNVQSLSGSPSNFQVYTALLKPHERIMALDLPHGGHLSHGYQTDTKKISAVSIFFETMPYRLNESTGYIDYDQLEKSAALFRPKLIVAGASAYARLYDYARVRKVCDKQKAVLLADMAHISGLVAAGVIPSPFDYADVVTTTTHKSLRGPRGAMIFFRKGVKEINKQGKEVLYDYEDKINQAVFPGLQGGPHNHTISGLAVALKQAMTPEFKNYQKQVLSNCSAFAQSLLEKGYELVSGGTDNHLVLVNLRNKGIDGSRVEKVLEAVHIAANKNTVPGDVSAMVPGGIRMGTPALTSRGFVEEDFEKVAEYFDAAVKLALQIKENTNGTKLKDFVAAMQSDEQIQSKIANLCHEVEDYAKKFPTIGFNIETMKYGK

SEQ ID NO: 9753 - DNA, 1557 bp, Glycine max
  CDS (1)..(1557)
atggcgatggcaatggcgcttcgcaggctttcatcttcaattgataagcctcttcgccctctcttcaatgcgggttccctctactacaagtcgtctttgcctgatgaagctgtttacgacaaggagcgacccggagttacatggccgaagcagttgaatgcttcacttgaggtcgttgatcctgagattgctgatattattgagcttgagaaagctaggcaatggaaggggctggaactgataccgtcagagaatttcacttctgtgtctgtgatgcaagcagttggatctgtgatgaccaacaaatacagtgaggggtaccctggtgcaagatattatggtggaaatgagtatattgacatggctgaaacactatgccaaaagcgtgccctggaagcgtttagattggatcccgctaaatggggagtgaacgtgcagcctctgtcagggtctcctgcaaatttccatgtctacactgcattgcttaaacctcatgaaagaatcatggcacttgatcttcctcatggtggccatctttctcatggatatcagactgataccaaaaagatatctgctgtctcaatattttttgagacaatgccatatagattgaacgaaagtacgggatacattgactatgaccagatggagaaatcagcaacactcttcaggccaaaattaattgttgctggagctagcgcttatgcacgtctgtatgattatgaacgtgtacgcaaggtttgtgataaacagaaagctatattattggcagatatggcacacatcagtggattggttgcagctggtgtcatcccatcaccttttgattatgcagatgtagttactaccaccactcacaagtcacttcggggaccacgtggagctatgatattctacagaaaaggcgttaaagaaattaacaaacaaggaaaagagctattgtatgactatgaggacaaaatcaaccaagctgttttccctggactgcaagggggccctcacaaccacactattactggtttagctgttgcattgaagcaggccacaactcccgaatatagagcatatcaggaacaagttctcagcaacagttttaaatttgcacaggctctaagtgagaggggctatgagctggtttctgggggaactgagaatcacctggttttggtgaatctgaagaataagggtattgatggctccagagttgagaaggtgttggaagcagttcatattgcagctaataaaaacactgttcctggagatgtgtctgccatggttcctggtggcatcaggatgggaacccctgctcttacttctagaggatttgttgaggaggattttgttaaggtagcagagttctttgatgcagcagtgaagttggctgtgaagattaagggacagagcaaaggaacaaagctgaaggacttcttggccacaattcaatcatcttctacctttcaatcggagatagcaaagctccgccatgatgttgaggactatgcaaaacaatttccaaccattggttttgagaaagctaccatgaagtacaagaattga

SEQ ID NO: 9754 - protein, 518 aa, Glycine max
MAMAMALRRLSSSIDKPLRPLFNAGSLYYKSSLPDEAVYDKERPGVTWPKQLNASLEVVDPEIADIIELEKARQWKGLELIPSENFTSVSVMQAVGSVMTNKYSEGYPGARYYGGNEYIDMAETLCQKRALEAFRLDPAKWGVNVQPLSGSPANFHVYTALLKPHERIMALDLPHGGHLSHGYQTDTKKISAVSIFFETMPYRLNESTGYIDYDQMEKSATLFRPKLIVAGASAYARLYDYERVRKVCDKQKAILLADMAHISGLVAAGVIPSPFDYADVVTTTTHKSLRGPRGAMIFYRKGVKEINKQGKELLYDYEDKINQAVFPGLQGGPHNHTITGLAVALKQATTPEYRAYQEQVLSNSFKFAQALSERGYELVSGGTENHLVLVNLKNKGIDGSRVEKVLEAVHIAANKNTVPGDVSAMVPGGIRMGTPALTSRGFVEEDFVKVAEFFDAAVKLAVKIKGQSKGTKLKDFLATIQSSSTFQSEIAKLRHDVEDYAKQFPTIGFEKATMKYKN

SEQ ID NO: 9755 - DNA, 1485 bp, Glycine max
  CDS (1)..(1485)
atgcaggcttgtacaatgatgagttctttgcaacaacaacctatttggaccaaagggttgaatttccctgcaaaagggtatggcagcaataacggctttgtaactcagttgaggttctgcaatattaagccatccaaagcttctcatgttgaagcaagtttggtcgctgggaagccatcatctgtgtctttctctgtgcctgaaattggaggtgatggaagtagcttcctggactatggcttgagtgaagctgatcctgaggttcgtgcaattattgacaaggaaaaggatcggcaatttaaaagtcttgagcttattgcttctgagaattttacatccagagcagtgatggaagcagttggttcgtgtctcacaaacaagtactcagaaggattgccgggtagaaggtactatggtggcaatgagtacattgatgagcttgaaaccctatgtcaacaaagggctttggctgcatttcatgtagatggaaacaagtggggtgttaatgttcaaactttatctggttccccagctaattttgcagtattcactgctgttcttaaaccacatgaccgaataatgggtttggacttgcctcacggaggacatttgtctcatggattcatgacacctaaaaaacgtgtcttattgattatgatatgctggagaaaactgctactctctttcgaccaaaactcattattgctggtgctaattgcagatgaagtaggtgcttttcttatgatggatatggctcatataagtgggcttgttgctgcatctgtacttgctaatccctttgagtattgtgatattgtgaccaccacaacccacaagtctttaagaggtccaagaggtggtatgatattcttcaagaaagataccgtgcatggggttgatctggagcctgccattaacaatgctgtttttcccggtctacagggaggtcctcataaccacacaattggaggactagcagtttgcttgaagtatgcccagtctccagaatttaaaaattaccaaaatcaggtggttgctaactgtaaagctcttgctcagcagttaattgagcacggatataaactagtttctggtggtagtgacaatcacctggttcttgttgatctaaggccatctggtcttgatggtgctcgggtggagaaaattcttgacatggcctccataaccctcaacaaaaattcagtgcctgatgataagagtgccctagttccgggaggcattcgaattgggacaccggcaatgacaacaagaggacttggtgagaaagagttttcactaattgcagatttccttcatgagggtgtgcaaatatgtcttgaagccaaaagtttggtctcaggaacgaagctccaagattttttgaagtttgtatcatcttctgaatttcctttgggagagaagatatcagagttgcgtaggaaagttgaagctcttactactcaatatccaatacccggagtctaa

SEQ ID NO: 9756 - protein, 494 aa, Glycine max
MQACTMMSSLQQQPIWTKGLNFPAKGYGSNNGFVTQLRFCNIKPSKASHVEASLVAGKPSSVSFSVPEIGGDGSSFLDYGLSEADPEVRAIIDKEKDRQFKSLELIASENFTSRAVMEAVGSCLTNKYSEGLPGRRYYGGNEYIDELETLCQQRALAAFHVDGNKWGVNVQTLSGSPANFAVFTAVLKPHDRIMGLDLPHGGHLSHGFMTPKKRVLLIMICWRKLLLSFDQNSLLLVLIADEVGAFLMMDMAHISGLVAASVLANPFEYCDIVTTTTHKSLRGPRGGMIFFKKDTVHGVDLEPAINNAVFPGLQGGPHNHTIGGLAVCLKYAQSPEFKNYQNQVVANCKALAQQLIEHGYKLVSGGSDNHLVLVDLRPSGLDGARVEKILDMASITLNKNSVPDDKSALVPGGIRIGTPAMTTRGLGEKEFSLIADFLHEGVQICLEAKSLVSGTKLQDFLKFVSSSEFPLGEKISELRRKVEALTTQYPIPGV

SEQ ID NO: 9757 - DNA, 1701 bp, Glycine max
  CDS (1)..(1701)
atggacctctctcaccctcaatccaacctgtccctcggattctcttcctcccacgcctctccgcctcgccgctccgacccgccggtgccgctgcagctcatggaaccgcagacggagaacggcaacaacctagatgtcgaatcggacgacgacgacgacgacaaagaagtcgaggagtttcgcattctaggccactcaatgtgcctcaagaggcgaagagattgcgactcctcctcctcctccgccgccgccgccaagagggtttccgtcgaacccgatctcgacgcgcgtaaggccgccgtgcgcgcgtggggctgccaacccctctccatcgctgatcccgacatccacgagataatggaaaaagagaagaagcgtcaattttgcgggatcgaactcatagcctccgagaatttcgtgtgcagggccgtgatggaagcgttggggagccacttgacgaacaagtactccgagggaatgcccggctcgcgctactacggcgggaatcagtacatagacgaaatcgaaactctctgttgcgaacgcgctttgaacgcgttcggcctcgaccccaagtgttggggggtgaacgtgcagccatattcgtgtacctctgctaatttttctgtttacaccggcttgttgctgcctggtgatcgtatcatggggctggatactccttctggagggaacactagtcacggttactatactcccaatgggaagaaagtttctggtgcttccattttctttgagagcttgccctacaaggtgaaccctcaaactggttacattgattacgataagctcgaggaaagggcgcttgattttcgccccaagatacttatttgtggtggcagctcctaccctcgagagtgggattatgccaggtttaggcacattgcggataagtgtggagctgtgttgttgtgtgacatggcgcagattagtggcataattgcagccaaggaatgtgtgaatccttttgattattgtgacattgttacttcaacaactcacaagagtcttcgaggtccaaggggaggcataattttttatcggaaaggtacaaagccaaggaacagagggattcttctaagtcagggacatgaaagtgatcaatatgactttgaagaaaagataaattttgctgtttttccatcgatgcaaggggggccacacaataaccacattgctgcgcttgctatagctttaaaacaagtggctactcctgagtataaggcatacatgcagcaggtgaagaagaatgcccaagctttagcatgtgctttactgagaagaaaatgccgtctagtaactgggggtacagacaaccatttaatactttgggatttaaggcccctgggattgacaggtaagttttatgagaaggtatgtgaaacatgtcatattactttgaataaaattgctatttttggcgacaatggaactataattcctggaggtgtaagagtaggtacccctgccatgacgtcaagaggatgtctggaagctgattttgagacaatggctgaatttctcattagagctgcacaaattgcaagcatactgcagagggagcatgggaaattgcagaagacaacattgaagggacttgagagccatagggacattgttgagctccgggcacgggttgaagcttttgcaactcagtttgccatgccgggttttgacatttga

SEQ ID NO: 9758 - protein, 566 aa, Glycine max
MDLSHPQSNLSLGFSSSHASPPRRSDPPVPLQLMEPQTENGNNLDVESDDDDDDKEVEEFRILGHSMCLKRRRDCDSSSSSAAAAKRVSVEPDLDARKAAVRAWGCQPLSIADPDIHEIMEKEKKRQFCGIELIASENFVCRAVMEALGSHLTNKYSEGMPGSRYYGGNQYIDEIETLCCERALNAFGLDPKCWGVNVQPYSCTSANFSVYTGLLLPGDRIMGLDTPSGGNTSHGYYTPNGKKVSGASIFFESLPYKVNPQTGYIDYDKLEERALDFRPKILICGGSSYPREWDYARFRHIADKCGAVLLCDMAQISGIIAAKECVNPFDYCDIVTSTTHKSLRGPRGGIIFYRKGTKPRNRGILLSQGHESDQYDFEEKINFAVFPSMQGGPHNNHIAALAIALKQVATPEYKAYMQQVKKNAQALACALLRRKCRLVTGGTDNHLILWDLRPLGLTGKFYEKVCETCHITLNKIAIFGDNGTIIPGGVRVGTPAMTSRGCLEADFETMAEFLIRAAQIASILQREHGKLQKTTLKGLESHRDIVELRARVEAFATQFAMPGFDI

SEQ ID NO: 9759 - DNA, 1557 bp, Nicotiana tabacum
  CDS (1)..(1557)
atggccatggcaacggctcttcgaagactttcctcttctgttgacaaaccaattaagcgtctctataatggcggctctctctattacatgtcatcgttgcctaatgaagctgtttacgagaaggaaaaaaatggtgtcacgtggccaaagcaacttaatgctcctctagaggaggttgatccagaaattgctgacattattgagcttgagaaagcacgccagtggaagggacttgaactcattccttcagaaaatttcacttctgtgtctgtaatgcaagctgttggatctgttatgacaaacaagtacagtgaaggataccctggggctagatactatggaggaaatgagtatattgacatggcggaaaccttatgccagaaacgtgctttagaagccttcaggttggatcctgcaaaatggggagtgaatgtgcagcctctgtcaggatcacctgctaattttcatgtttacactgcacttttaaaacctcatgaaagaatcatggcccttgatcttccccacggtggacatctttctcatggatatcagactgatacaaagaagatatctgccgtctctatattttttgagaccatgccatatagactgaatgagagcactggctacattgactatgaccagcttgagaaaagtgccacactctttaggccaaagttaattgtcgctggtgctagtgcttatgcacgtctttatgactatgcacgtatccgaaaggtttgtgacaaacagaaggctatcatgttggcagatatggctcatattagtgggttagttgcagctggagtcatcccatcaccatttgattatgcagatgttgtgaccaccacaacccacaaatcccttcgcgggcctcgtggtgccatgattttcttccggaagggtgtgaaggaggttaacaagcaaggcaaggaggtgttgtacgactatgaagataaaattaaccaggcagtctttcccggacttcaaggtggtcctcacaaccatacaattactggcttggcagttgctttgaaacaggcaatgactccagaatacagagcttaccaagagcaatgccttagcaactgctcaaaatttgcccaggctttagcgggaatgggttatgaacttgtttctggtggaacagagaatcacttggttttggtgaacttgaaaaacaagggtattgatggttctagggttgaaaaagttttggaagcggtacatattgcagcgaataagaacactgttcctggagatgtatctgccatggtccctggtggcatcagaatggggactcctgcactcacatcaaggggatttattgaggaagattttgtgaaagttgctgaattctttgatgctgctgtgaagatagcagtgaaaataaagactgaagctcaaggaacaaagttgaaagactttgtgacaacactacagtctagcgcttcaatccagtcggagattgcaaaactccgccatggtgtggaggagtatgcaaagcagttccctacaattgggtttgagaaggaaaccatgaagtacaaaaactga

SEQ ID NO: 9760 - protein, 518 aa, Nicotiana tabacum
MAMATALRRLSSSVDKPIKRLYNGGSLYYMSSLPNEAVYEKEKNGVTWPKQLNAPLEEVDPEIADIIELEKARQWKGLELIPSENFTSVSVMQAVGSVMTNKYSEGYPGARYYGGNEYIDMAETLCQKRALEAFRLDPAKWGVNVQPLSGSPANFHVYTALLKPHERIMALDLPHGGHLSHGYQTDTKKISAVSIFFETMPYRLNESTGYIDYDQLEKSATLFRPKLIVAGASAYARLYDYARIRKVCDKQKAIMLADMAHISGLVAAGVIPSPFDYADVVTTTTHKSLRGPRGAMIFFRKGVKEVNKQGKEVLYDYEDKINQAVFPGLQGGPHNHTITGLAVALKQAMTPEYRAYQEQCLSNCSKFAQALAGMGYELVSGGTENHLVLVNLKNKGIDGSRVEKVLEAVHIAANKNTVPGDVSAMVPGGIRMGTPALTSRGFIEEDFVKVAEFFDAAVKIAVKIKTEAQGTKLKDFVTTLQSSASIQSEIAKLRHGVEEYAKQFPTIGFEKETMKYKN

SEQ ID NO: 9761 - DNA, 1533 bp, Hordeum vulgare
  CDS (1)..(1533)
atggccatggcgacggcgctccgcaagctctccgcccgcggtcagcccctctcccgactcacgccgctctactccatggcgtccctgccggcgacggaggagagatccgcagtcacctggccgaagcagctcaacgcgccgctggaggaggtcgacccggagattgccgacatcatcgagctcgagaaggcccgccaatggaaggggctggagctcatcccgtcggagaacttcacctccctgtcggtgatgcaggccgtgggatccgtcatgacgaacaagtacagcgaggggtaccccggcgccagatactacggtggaaacgaatacattgatatggccgagacgctgtgccagaaacgtgctttggaggccttcaatttggacccggagaagtggggagtgaatgtgcaacctctgtcgggttcacctgccaacttccatgtatacactgctctgctgaagccacatgacagaattatggccctggatcttcctcacggtggacatctttcccatggttaccagactgacacaaagaaaatctcagcagtttcaatattctttgagacaatgccttacagactggatgaaagcactggcttgattgattatgaccagttggagaaaagtgccgttctttttaggccaaagttgattgttgctggtgctagtgcatatgctcgcctttatgattataaccgcatgcggaagatctgtgacaagcagaaggcagttcttctcgcagacatggcacatatcagtgggctagttgctgctggtgtcattccctctccttttgagtatgccgatgtggtgactaccactacccacaagtcactccgtggtccacgtggagccatgatctttttccggaagggggtgaaagaaataaacaaacaagggaaggaggttaagtatgattttgaggacaaaatcaatgctgctgtcttccctggtctgcaaggtggaccacataaccatactattactggcctggccgttgcgcttaagcaggcaactactcaggagtaccgagcttatcaagagcaagttatgagcaactctgctagatttgctgagagcttgacttccaaaggctacgacattgtctctggtgggactgataaccatttagttttggtgaacctcaagaaaaagggaatagatggttcaagagtggagaaggttttagaaaatgtgcatattgcagcaaacaagaacacagttcctggtgatgtttcagctatggtacccggaggcatcaggatgggaacccccgcgcttacatcaagaggatttgttgaggaggacttcgccaaggttgccgaattcttcgattcggcagtgaacttggctttgaaggttaaagctgcagcagcaggtaccaaactgaaggactttgttgccactttgcaatccgacagcaacatccaagctgaaattgcaaagcttcgccacgatgtggaggaatatgcaaaacaattcccaacaatcggattcgagaaagagaccatgaagtacaagaactaa

SEQ ID NO: 9762 - protein, 510 aa, Hordeum vulgare
MAMATALRKLSARGQPLSRLTPLYSMASLPATEERSAVTWPKQLNAPLEEVDPEIADIIELEKARQWKGLELIPSENFTSLSVMQAVGSVMTNKYSEGYPGARYYGGNEYIDMAETLCQKRALEAFNLDPEKWGVNVQPLSGSPANFHVYTALLKPHDRIMALDLPHGGHLSHGYQTDTKKISAVSIFFETMPYRLDESTGLIDYDQLEKSAVLFRPKLIVAGASAYARLYDYNRMRKICDKQKAVLLADMAHISGLVAAGVIPSPFEYADVVTTTTHKSLRGPRGAMIFFRKGVKEINKQGKEVKYDFEDKINAAVFPGLQGGPHNHTITGLAVALKQATTQEYRAYQEQVMSNSARFAESLTSKGYDIVSGGTDNHLVLVNLKKKGIDGSRVEKVLENVHIAANKNTVPGDVSAMVPGGIRMGTPALTSRGFVEEDFAKVAEFFDSAVNLALKVKAAAAGTKLKDFVATLQSDSNIQAEIAKLRHDVEEYAKQFPTIGFEKETMKYKN

SEQ ID NO: 9763 - DNA, 1554 bp, Arabidopsis thaliana
  CDS (1)..(1554)
atggcgatggccatggctcttcgaaggctttcttcttcaattgacaaacccattcgtcctcttattcgatccacttcatgttacatgtcttctttgcccagtgaagctgttgatgagaaggaaagatctcgtgtcacttggccaaaacagcttaacgcacctttagaggaggttgatcctgagattgctgacattattgagcatgagaaagctagacaatggaagggacttgaacttattccatctgagaacttcacatctgtgtcggtgatgcaagctgttgggtctgtcatgactaacaaatacagtgaaggctatcctggtgccagatactatggaggaaatgagtatatagacatggcagaaaccttatgccagaagcgcgctcttgaagctttccggttagatcctgaaaagtggggagtgaatgttcaacctttgtctggatctcctgccaacttccatgtgtacactgcattgttaaagcctcatgaaagaatcatggcacttaatcttcctcatggtggtcatctttctcatggttatcagactgacaccaagaagatatcagctgtgtctatcttctttgaaacaatgccctatagattggacgagagcactggctacatcgactacgatcagatggagaaaagtgctactcttttcaggccaaaattgattgttgctggtgcaagtgcttatgctagattgtatgactatgcccgcatcagaaaggtctgtaacaagcaaaaagctgtaatgctagcagatatggcacacatcagtggtttggttgctgctaatgtaatcccttcaccgttcgactatgctgatgttgtaaccaccacaactcacaagtcacttcgtggaccccgtggagccatgattttcttcagaaagggtgttaaggaaattaacaagcaagggaaagaggttttgtatgattttgaagacaagatcaaccaagctgtcttccctggtcttcaaggtggtccacacaaccacactatcacaggactagctgttgctttgaaacaggcaactacttcagagtacaaagcataccaagaacaagtcctgagtaacagtgcaaagtttgctcagactctaatggagagaggatatgaacttgtttctggtggaactgacaaccatctggttctagtgaatctaaagcccaagggaattgatggatctagagttgagaaagtgttggaagctgttcacattgcatccaacaaaaacactgttcctggagatgtttctgccatggttcctggtggaatcagaatgggtactcctgctctcacttccagaggctttgttgaggaagactttgccaaagtagctgaatacttcgacaaagctgtgacaatagctctcaaagtcaaatctgaagctcaaggaaccaagttgaaggatttcgtgtcagcaatggaatcctcttcaaccatccaatccgagattgcgaaactgcgccatgaagtcgaggaattcgctaagcagttcccaacaattgggtttgagaaagaaaccatgaagtacaagaactaa

SEQ ID NO: 9764 - protein, 517 aa, Arabidopsis thaliana
MAMAMALRRLSSSIDKPIRPLIRSTSCYMSSLPSEAVDEKERSRVTWPKQLNAPLEEVDPEIADIIEHEKARQWKGLELIPSENFTSVSVMQAVGSVMTNKYSEGYPGARYYGGNEYIDMAETLCQKRALEAFRLDPEKWGVNVQPLSGSPANFHVYTALLKPHERIMALNLPHGGHLSHGYQTDTKKISAVSIFFETMPYRLDESTGYIDYDQMEKSATLFRPKLIVAGASAYARLYDYARIRKVCNKQKAVMLADMAHISGLVAANVIPSPFDYADVVTTTTHKSLRGPRGAMIFFRKGVKEINKQGKEVLYDFEDKINQAVFPGLQGGPHNHTITGLAVALKQATTSEYKAYQEQVLSNSAKFAQTLMERGYELVSGGTDNHLVLVNLKPKGIDGSRVEKVLEAVHIASNKNTVPGDVSAMVPGGIRMGTPALTSRGFVEEDFAKVAEYFDKAVTIALKVKSEAQGTKLKDFVSAMESSSTIQSEIAKLRHEVEEFAKQFPTIGFEKETMKYKN

SEQ ID NO: 9765 - DNA, 1416 bp, Oryza sativa Japonica Group
  CDS (1)..(1416)
atggactccgtcgcgtcgtgggggctgaccccgctcgccgcggccgacccgctcgtccacgacctcctcgagcgggagaagcggcggcagcggagcggcatcgagctcatcgcctcggagaacttcacctccttcgccgtcatggaggccctcggctccgcgctcaccaacaagtactccgaggggatgcccggggcgcgctactacggcgggaacgacgtcatcgacgagatcgagaacctgtgccgcgaccgcgccctcgccgcgttccgcctcgacgccgcgtcgtggggcgtcaacgtgcagccctactccggctcgccggccaccttcgccgcctacacggcgctcctcaacccgcacgaccgcatcatggggctcgacctcccctccggtggccacctcacccatggctactacaccgcgggcgggaagaagatctccgcgacgtcgatctacttcgagagcctcccctacaaggtgagcgccgccacggggtacatcgactacgagaagctggaggagaaggcgctcgacttccgccccaagctcatcatctgcggcggcagcgcgtacccgagggactgggactacgccaagctcagggccgtcgccgacaaggtcggggcgctgctcctctgcgacatggcgcacatcagcggcctcgtcgccgcgcaggaagctgcaaatccttttgagtactgtgatgtggttaccaccaccacgcacaagtccctccgaggaccaagagctggcatgatcttctacaggaagggccctaagcctcccaagaagggccagcctgagggtgctgtctatgactacgaggacaagatcaacttcgcagtgttcccgtcactgcaaggtggtcctcacaaccaccagattgcagcccttgctgttgctctgcagcaaaccatgacacctggattcaaggcctacgcaaagcaggtcaaggccaacgctgtcgccattggcaagtatcttatgagcaagggctacaaaatggtgactgatggaactgagaaccaccttgttctctgggatcttcgccctcttggcttgactggcaacaaggttgagaagatgtgtgacctttgcagcattacacttaacaagaatgctgtctttggtgacagcagtgcattggctcctggcggtgtccgcattggtactcctgcgatgacatccaggggtcttgtcgagaaggactttgagcagatcggcgagttcctccaccaggccgtgaccatctgcctcaacatccagaaggagcacggcaagctcctcaaggacttctccaagggcctggtgaacaacaaggacatcgagaacctcaagctggaggtcgagaagttcgccacctccttcgacatgcccggcttcaccctcgacagcatgaagtacaaggagtag

SEQ ID NO: 9766 - protein, 471 aa, Oryza sativa Japonica Group
MDSVASWGLTPLAAADPLVHDLLEREKRRQRSGIELIASENFTSFAVMEALGSALTNKYSEGMPGARYYGGNDVIDEIENLCRDRALAAFRLDAASWGVNVQPYSGSPATFAAYTALLNPHDRIMGLDLPSGGHLTHGYYTAGGKKISATSIYFESLPYKVSAATGYIDYEKLEEKALDFRPKLIICGGSAYPRDWDYAKLRAVADKVGALLLCDMAHISGLVAAQEAANPFEYCDVVTTTTHKSLRGPRAGMIFYRKGPKPPKKGQPEGAVYDYEDKINFAVFPSLQGGPHNHQIAALAVALQQTMTPGFKAYAKQVKANAVAIGKYLMSKGYKMVTDGTENHLVLWDLRPLGLTGNKVEKMCDLCSITLNKNAVFGDSSALAPGGVRIGTPAMTSRGLVEKDFEQIGEFLHQAVTICLNIQKEHGKLLKDFSKGLVNNKDIENLKLEVEKFATSFDMPGFTLDSMKYKE

SEQ ID NO: 9767 - DNA, 1404 bp, Drosophila melanogaster
  CDS (1)..(1404)
atggccgatcagaaactgctgcaaaccccgctggcacagggcgatccggagctggccgagctgatcaagaaggagaaggagcgccagcgcgaaggactcgagatgatcgccagtgagaacttcacctcggtggcggttctcgagagcctgagctcctgcctgaccaacaagtactccgagggatatcccggcaagaggtactacggtggcaacgagtacatcgaccgcatagagctgctcgcccagcaacgcggacgcgagctgttcaacctggacgatgagaagtggggcgttaatgtgcagccttattccggatccccggccaatctggctgtctacacgggcgtctgccggccccacgatcgcatcatgggcctggatctgcccgatggcggtcacttgacgcacggtttcttcacgcccaccaagaagatatcggccacatcgatcttcttcgagagcatgccgtacaaagtgaacccggagacgggcatcatcgattacgataagttggcggaggcggcgaagaatttccggccgcagatcatcattgctggcatatcgtgctactcccgtctgctggactatgcgcgtttccgacagatttgcgatgatgtgggcgcctacctgatggccgacatggcccatgtggcgggcattgtggccgcgggattgataccatcgccgttcgaatgggccgacattgtgaccaccaccacgcacaagacactgcgaggtccgcgcgccggcgtgatcttcttccgcaagggcgtgcgcagcaccaaggccaatggagacaaggtactctacgatctggaggagcgcatcaaccaggcggtgtttccatcactccagggtggtccgcacaacaacgccgtggctggcattgccaccgccttcaagcaggccaagagtcccgaattcaaggcctaccagacgcaggtgctcaagaatgccaaggccctgtgcgatggcctcatttcgcgaggctatcaggtggccaccggcggcaccgacgtccatttggtgctggtcgatgtgcgtaaggctggcctgaccggcgccaaggccgagtacatcctcgaggaggtgggcatcgcgtgcaacaagaacactgtgcccggcgacaagtccgccatgaatccctccggcatccggctgggcacaccggccctgaccactcgcggccttgccgagcaggacatcgagcaggtggtggccttcatcgatgctgccctaaaggttggcgtccaggcagccaagctggccggcagtcccaagataaccgattaccacaagacgctggccgagaatgtggagctcaaggcccaggtggacgagatccgcaagaatgtggcccagttcagcaggaaattcccgctgcccggcctggagaccctgtag

SEQ ID NO: 9768 - protein, 467 aa, Drosophila melanogaster
MADQKLLQTPLAQGDPELAELIKKEKERQREGLEMIASENFTSVAVLESLSSCLTNKYSEGYPGKRYYGGNEYIDRIELLAQQRGRELFNLDDEKWGVNVQPYSGSPANLAVYTGVCRPHDRIMGLDLPDGGHLTHGFFTPTKKISATSIFFESMPYKVNPETGIIDYDKLAEAAKNFRPQIIIAGISCYSRLLDYARFRQICDDVGAYLMADMAHVAGIVAAGLIPSPFEWADIVTTTTHKTLRGPRAGVIFFRKGVRSTKANGDKVLYDLEERINQAVFPSLQGGPHNNAVAGIATAFKQAKSPEFKAYQTQVLKNAKALCDGLISRGYQVATGGTDVHLVLVDVRKAGLTGAKAEYILEEVGIACNKNTVPGDKSAMNPSGIRLGTPALTTRGLAEQDIEQVVAFIDAALKVGVQAAKLAGSPKITDYHKTLAENVELKAQVDEIRKNVAQFSRKFPLPGLETL

SEQ ID NO: 9769 - DNA, 1401 bp, Zea mays
  CDS (1)..(1401)
atgagtgatatcaaagtgttgaacgcctccctggccgactccgatccggagctgtacgatttaatcaaaaaagagaaaaaacgtcagctgtccggcttagagatgatcgcctcggagaatttcaccaccatgccagtattacagtgcctgagtacgtgcctgcacaataaatactccgaaggtctgccggggcagcgctactacggcggcaatgagttcattgatgagatcgaggtgctggcacagaagagggcgctgcagacgtacaaattggacgccgacaagtggggcgtgaatgttcagccgtattccggatcgcctgggaattttgctgtttacactggtattgtcgagccacatggtcgtattatgggtcttgacctacccgatggtggtcatttgacgcacggtttcttcacgccaacgaaaaaaatctcagctacgtcgattttcttcgaatctatgccttacaaggttaatcctgacactggcttaattgattatgaccaactagccaaatccgctcgacttttccgcccaaaagtcatcatcgccggcgtgagctgttattcgcgcccattggactacaaacgcttccgcgaaatctgcgacgaagtcggcgcttacttagtcagcgacatggcgcacatttccggtcttgtagccgctggcgtcacgcccagccccttcgagtactccgacgtcgtcaccacaacaacgcacaaaagcctacggggtccgcgcgcaggcgtcattttcttccgcaaaggcgtgcgcagcgtcaacgccaaaggcgacaaaatcatgtacgacctcgagagtcgcatcaaccaagccgtgtttccgggcctgcaaggcggcccgcacaacaacaccatcgccgctattgccaccgccatgaaacaagccgccacgccgcagtttgtcgagtacgctaagcaaattgtggcgaatgcgcagcggctttcggaccgcctccaggaagcggggtacaaagtcgttactggcggcacggaagtgcacatgcttttagtggacttgcgctccaaaggcttgaccggcgcgaaaggggaattcattctagaggagattaacattgcgtgcaataaaaacacagttccaggagataaaagcgcgttaaatccgtctggaattcggttgggaacgccagcgctgaccactcgaggcttgaaagaagccgatattgatcaagttgttaagttaatggatgatgccttgaaattgggcaaagaaatcagcgataagtccggaccgaagttggtggactttaaaaaattgtgccatgaagatgccactttctcgaagaaaattcgggagctgaaagagcgcgtggcgcagttcagtactaaattcccgcttccgggatatgatgaatgttaa

SEQ ID NO: 9770 - protein, 466 aa, Zea mays
MSDIKVLNASLADSDPELYDLIKKEKKRQLSGLEMIASENFTTMPVLQCLSTCLHNKYSEGLPGQRYYGGNEFIDEIEVLAQKRALQTYKLDADKWGVNVQPYSGSPGNFAVYTGIVEPHGRIMGLDLPDGGHLTHGFFTPTKKISATSIFFESMPYKVNPDTGLIDYDQLAKSARLFRPKVIIAGVSCYSRPLDYKRFREICDEVGAYLVSDMAHISGLVAAGVTPSPFEYSDVVTTTTHKSLRGPRAGVIFFRKGVRSVNAKGDKIMYDLESRINQAVFPGLQGGPHNNTIAAIATAMKQAATPQFVEYAKQIVANAQRLSDRLQEAGYKVVTGGTEVHMLLVDLRSKGLTGAKGEFILEEINIACNKNTVPGDKSALNPSGIRLGTPALTTRGLKEADIDQVVKLMDDALKLGKEISDKSGPKLVDFKKLCHEDATFSKKIRELKERVAQFSTKFPLPGYDEC

SEQ ID NO: 9771 - DNA, 1752 bp, Zea mays
  CDS (1)..(1752)
atggatctctcgcggcccgcatcgtcagacctctcgctcgggctgcactctcatgcccacgcccacgctcgcgtgcatgcggcagccgcgccgctgcgcctgttcgacgacgcgaagccggagcgcctcgtggccggggaggccgacgcggagagggacgacggggacggtggcgaccagcacttctccctcctcgggcactccctctgcgtcaagcgcccgcgccgcgccgtcaacggcggtgggggcgggggtggagagacgtcatcctgctcgtccccggcgctgcgccccgccaagcggcaggcggcgggggaagatagcggcgcggatctggagacccgccgcgccgcggtccgttcctggggcaaccagtcgctggcggaggccgacccggatgtgcacgcgctgatggagcaggagctgtcccgccaggtgcgtggcatcgagctcatagcgtcggagaacttcgtctgccgcgcggtgctcgacgcgctcggcagccacctcaccaacaagtactctgagggggccccgggtgctcgctactacggcgggaatcagcacatcgatgccatcgagcggctctgccatgagcgcgccctcactgccttcggtctcgaccctgcctgctggggcgtcaacgtgcagccgtactcgtgcacgtctgccaatttggctgtctacactggtcttcttcaacccaaggaccgcatcatggggctggagccaccgtcgggcggccatgttagccatggttactacacgcccagtggcaagaaggtgtcaggtgcctctattttcttcgaaagcatgtcgtacaaggtgaacccacaaactgggtatattgattacgacaagctcgaggagagagcaatggatttccacccgaaaattctcatatgtggtgggagctcttaccccagagagtgggactttgctcggatgagattgattgctgataagtgtggtgcagtgcttctttgcgatatggcacatatcagtgggcttgttgcagcaaaggaatgtcgtagccctttcgactactgtgatgttgttacgtcaactactcacaagaatcttaggggccctagaggtggtataatattcttcaggaaagggaaaaatttaaggaaacgagctggatctttttctcaaggagatgagaatgaatacgacttcgaggataggataaattttggtgtttttccttcaatgcaaggggggccccataataatcatattgctgccttggctattactctgaagcaagtcgcaactcctgagtataaagcgtacattcaacaagtcaagaaaaatgctcaggctctagcatcagcgttgctcagaagaaaatgcagattggttactggtggcacagataatcacttaatactttgggatctcagaactcttggcttgactggtaagatctttgagaaggtctgtgaggcatgccacatatctatcaacaagacaccaatttatggggataatggctcgatatcccctgggggtgtgcggatcggaacacctgcaatgactactagaggttgcctagaagaggacttcgagtcgattgcagacttcctcataagggctactcagattgctagcaatgttctgaaagaacatggcaaagtgcaaaaggagtttctaagaggcctaatgaacaataaggatgttatggaactccgaaatcaggttgaggcatttgcgtcacagtttgctatgccaggttttgatgtatga

SEQ ID NO: 9772 - protein, 583 aa, Zea mays
MDLSRPASSDLSLGLHSHAHAHARVHAAAAPLRLFDDAKPERLVAGEADAERDDGDGGDQHFSLLGHSLCVKRPRRAVNGGGGGGGETSSCSSPALRPAKRQAAGEDSGADLETRRAAVRSWGNQSLAEADPDVHALMEQELSRQVRGIELIASENFVCRAVLDALGSHLTNKYSEGAPGARYYGGNQHIDAIERLCHERALTAFGLDPACWGVNVQPYSCTSANLAVYTGLLQPKDRIMGLEPPSGGHVSHGYYTPSGKKVSGASIFFESMSYKVNPQTGYIDYDKLEERAMDFHPKILICGGSSYPREWDFARMRLIADKCGAVLLCDMAHISGLVAAKECRSPFDYCDVVTSTTHKNLRGPRGGIIFFRKGKNLRKRAGSFSQGDENEYDFEDRINFGVFPSMQGGPHNNHIAALAITLKQVATPEYKAYIQQVKKNAQALASALLRRKCRLVTGGTDNHLILWDLRTLGLTGKIFEKVCEACHISINKTPIYGDNGSISPGGVRIGTPAMTTRGCLEEDFESIADFLIRATQIASNVLKEHGKVQKEFLRGLMNNKDVMELRNQVEAFASQFAMPGFDV

SEQ ID NO: 9773 - DNA, 1473 bp, Nasonia vitripennis
  CDS (1)..(1473)
atgcttgtatattttttaaaaaatcagaagatatcagttataacttatcggttttattgtgtttatttaaaaaagaaaatggatagcatgatacataagaatgtttgggaaactgaccaagaactttttgaacttatgaaaaaagaaaagattcgtcaagaatcaggacttgaaatgatagctagtgaaaattttacatctttaagtgttttacaatgtcttagttcatgtcttcataataagtatagtgagggcctgccaggacaaagatattatggtggtaacgaatatattgatgaaatagaattgttagctcaaaaaagatgtttagaggcgtttcgtttaaatcctgaagaatggggttgtaacgtccaaccatactctggaagtcctgctaattttgctgtctatacaggtttaatagagcctcatggacgtataatgggattagatcttcccgacggtggtcatttaactcatggatttttcacgaataataaaaaaatttcagctacttctatatttttcgaatcaatgccttacaaagttaaaccagacaccggtctaattgactataataagcttgcagaagatgcaaagttatttaaaccaaaaatcattattgctggagtctcgtgttacagcagatgtctcgattacaaaaaatttagagaaatagctgatgaaaataatgcttatctttttagtgatatggcacacatatctggattagtagctgctggcataatagctagtccttttgaatacagtgatgtagtttcaacaacaacgcataaaacgttaagaggccctcgtgccggagtgatttttttccgtaaaggtataaaaaatattgcaaaaaatggagaaaaaataatgtacgatctggaaaacaagattaatcaagcagtatttccgggactacagggtggtccacataatcatgctatagctggtatagctacatcaatgaaacaagttaccaggccagagtttgtaacttatcaaaaacaagtgattgctaatgcaaaaagactgtgtagtcaattacaggaattcggttataaaattagtacaggtggtacagatgtacacatgctcttggttgatttgcgacctgtgagtttaacagggtcaaaggctgaaaaaatattagaggaaatttcaatagcatgtaataagaatacagtccctggtgatagaagtgcctttaatccaagtggaatcaggcttggaactccagcattgacaactcgaggtttgaaagaaaacgatattgatcaagttgctgcatttattcataaaggtttgatattagctaaagaaattactattaaatcaggacctaagcttgttgacttcaaaagtacattggagaacgatgatcattttcgaaaacaaataagcgcattaaaagcggaagtggaaaagtttgcacaaagttttcctatacccggtcatgaaaattattga

SEQ ID NO: 9774 - protein, 490 aa, Nasonia vitripennis
MLVYFLKNQKISVITYRFYCVYLKKKMDSMIHKNVWETDQELFELMKKEKIRQESGLEMIASENFTSLSVLQCLSSCLHNKYSEGLPGQRYYGGNEYIDEIELLAQKRCLEAFRLNPEEWGCNVQPYSGSPANFAVYTGLIEPHGRIMGLDLPDGGHLTHGFFTNNKKISATSIFFESMPYKVKPDTGLIDYNKLAEDAKLFKPKIIIAGVSCYSRCLDYKKFREIADENNAYLFSDMAHISGLVAAGIIASPFEYSDVVSTTTHKTLRGPRAGVIFFRKGIKNIAKNGEKIMYDLENKINQAVFPGLQGGPHNHAIAGIATSMKQVTRPEFVTYQKQVIANAKRLCSQLQEFGYKISTGGTDVHMLLVDLRPVSLTGSKAEKILEEISIACNKNTVPGDRSAFNPSGIRLGTPALTTRGLKENDIDQVAAFIHKGLILAKEITIKSGPKLVDFKSTLENDDHFRKQISALKAEVEKFAQSFPIPGHENY

SEQ ID NO: 9775 - DNA, 1497 bp, Acyrthosiphon pisum
  CDS (1)..(1497)
atgtacttacgtccaataatacgtaccttggttaatgctcaacggcttcatttcaacaacaaatttgtaaccatgtcagcaatggaagcaaaatatagcactaaaatatcggatccaacattaagtctcccattggagacagctgatcctgagttgtatgctttagttagtcaagagtctcaacgacagaagaaaggacttgaacttatagcatcagaaaattttacctcagtttctgttttacaatgtttaggatcttgtttaactaacaaatattctgaaggtctaccgggtgcaagatactatggcggtaatcaagtaattgatcagatagaagttttatgccaaaaaaggtgtcttgaagcattttctttggatccaaatctatggggtgtcaatgtccaaccatattctggttcacccgcgaatgttgaagcttacactgctcttattggaggaggcaaaggacgaataatgggcttggatttaccagatggtggtcatatcagtcatggtctgatggctcaaaaaaaaagattgtctgcagcatcaatattttttgaaactttaccatatcacgtaaatatggaaactggtttaattgattatgacgagttagaaaaatctgcaaagaattttaagcctgatattattattgctggcgtaacttcctacccaaggacattggactataaacgttttagaacaatagctcaggctagtgattcttacttgatggctgatatgtcacatattagtggtttagttgctgctggtgttattccttcaccttttgaatattgtgatgtggtcacttctactactcataaaacattaagaggtcctcgagctggagtcatattttatcgtaaaggagttaaatcagtatcaaaaactggtgaaaatgtcatgtatgacttggaagaccgtgtaaatgctgctgttttcccaggatttcaaggaggacctcacaataatgctattggaggaatagcagctgctatgcgtttggcaactacccaggaattcaaagactaccaaaaaagagttttgagcaattgtaaacaattagctgaatctctaaaacagcttggatacaaaatatccactgatggtacagatgtgcatatgttgttagttgatcttcggccaattaatttgactggttctaaagcagagtttacattacaaactgtagaaattgtgtgtaataaaaacaccgttcctggtgacaaaagtgcaatgaatccttatggtattcgtttgggtacaccagctcttactacacgaggaatggtggaaaatgatatcattaaagttgctgaattaattcacaaaggtttgaccttggcgttggatgctcaaaaagtatctggtccaaaattagtgaacttcaaatccactcttacttcagatccagtgtttgttaatcgtgtaaaagaaattacgaaagaagtagaagatttcgcagtaaacttttatattcctgaacaataa

SEQ ID NO: 9776 - protein, 498 aa, Acyrthosiphon pisum
MYLRPIIRTLVNAQRLHFNNKFVTMSAMEAKYSTKISDPTLSLPLETADPELYALVSQESQRQKKGLELIASENFTSVSVLQCLGSCLTNKYSEGLPGARYYGGNQVIDQIEVLCQKRCLEAFSLDPNLWGVNVQPYSGSPANVEAYTALIGGGKGRIMGLDLPDGGHISHGLMAQKKRLSAASIFFETLPYHVNMETGLIDYDELEKSAKNFKPDIIIAGVTSYPRTLDYKRFRTIAQASDSYLMADMSHISGLVAAGVIPSPFEYCDVVTSTTHKTLRGPRAGVIFYRKGVKSVSKTGENVMYDLEDRVNAAVFPGFQGGPHNNAIGGIAAAMRLATTQEFKDYQKRVLSNCKQLAESLKQLGYKISTDGTDVHMLLVDLRPINLTGSKAEFTLQTVEIVCNKNTVPGDKSAMNPYGIRLGTPALTTRGMVENDIIKVAELIHKGLTLALDAQKVSGPKLVNFKSTLTSDPVFVNRVKEITKEVEDFAVNFYIPEQ

SEQ ID NO: 9777 - DNA, 1425 bp, Acyrthosiphon pisum
  CDS (1)..(1425)
atgtcagcaatggaagcaaaatatagcactaaaatatcggatccaacattaagtctcccattggagacagctgatcctgagttgtatgctttagttagtcaagagtctcaacgacagaagaaaggacttgaacttatagcatcagaaaattttacctcagtttctgttttacaatgtttaggatcttgtttaactaacaaatattctgaaggtctaccgggtgcaagatactatggcggtaatcaagtaattgatcagatagaagttttatgccaaaaaaggtgtcttgaagcattttctttggatccaaatctatggggtgtcaatgtccaaccatattctggttcacccgcgaatgttgaagcttacactgctcttattggaggaggcaaaggacgaataatgggcttggatttaccagatggtggtcatatcagtcatggtctgatggctcaaaaaaaaagattgtctgcagcatcaatattttttgaaactttaccatatcacgtaaatatggaaactggtttaattgattatgacgagttagaaaaatctgcaaagaattttaagcctgatattattattgctggcgtaacttcctacccaaggacattggactataaacgttttagaacaatagctcaggctagtgattcttacttgatggctgatatgtcacatattagtggtttagttgctgctggtgttattccttcaccttttgaatattgtgatgtggtcacttctactactcataaaacattaagaggtcctcgagctggagtcatattttatcgtaaaggagttaaatcagtatcaaaaactggtgaaaatgtcatgtatgacttggaagaccgtgtaaatgctgctgttttcccaggatttcaaggaggacctcacaataatgctattggaggaatagcagctgctatgcgtttggcaactacccaggaattcaaagactaccaaaaaagagttttgagcaattgtaaacaattagctgaatctctaaaacagcttggatacaaaatatccactgatggtacagatgtgcatatgttgttagttgatcttcggccaattaatttgactggttctaaagcagagtttacattacaaactgtagaaattgtgtgtaataaaaacaccgttcctggtgacaaaagtgcaatgaatccttatggtattcgtttgggtacaccagctcttactacacgaggaatggtggaaaatgatatcattaaagttgctgaattaattcacaaaggtttgaccttggcgttggatgctcaaaaagtatctggtccaaaattagtgaacttcaaatccactcttacttcagatccagtgtttgttaatcgtgtaaaagaaattacgaaagaagtagaagatttcgcagtaaacttttatattcctgaacaataa

SEQ ID NO: 9778 - protein, 474 aa, Acyrthosiphon pisum
MSAMEAKYSTKISDPTLSLPLETADPELYALVSQESQRQKKGLELIASENFTSVSVLQCLGSCLTNKYSEGLPGARYYGGNQVIDQIEVLCQKRCLEAFSLDPNLWGVNVQPYSGSPANVEAYTALIGGGKGRIMGLDLPDGGHISHGLMAQKKRLSAASIFFETLPYHVNMETGLIDYDELEKSAKNFKPDIIIAGVTSYPRTLDYKRFRTIAQASDSYLMADMSHISGLVAAGVIPSPFEYCDVVTSTTHKTLRGPRAGVIFYRKGVKSVSKTGENVMYDLEDRVNAAVFPGFQGGPHNNAIGGIAAAMRLATTQEFKDYQKRVLSNCKQLAESLKQLGYKISTDGTDVHMLLVDLRPINLTGSKAEFTLQTVEIVCNKNTVPGDKSAMNPYGIRLGTPALTTRGMVENDIIKVAELIHKGLTLALDAQKVSGPKLVNFKSTLTSDPVFVNRVKEITKEVEDFAVNFYIPEQ

SEQ ID NO: 9779 - DNA, 1473 bp, Saccharomyces cerevisiae
  CDS (1)..(1473)
atgtttcccagagcttctgcattggccaaatgtatggcaactgttcatcgtcgtgggctactcaccagtggtgcacaatcgctagtctccaaaccagtctcggagggagatccagagatgtttgacatcttgcaacaagaacgtcacagacaaaaacactctatcacccttatcccatcagaaaacttcacctcgaaggccgttatggatttgctaggttctgagctccaaaacaagtattctgaaggttatccaggtgaaagatactacggaggtaacgaaatcatcgataagtccgaatccttgtgtcaagcaagagctctggaactgtacggattagaccctgccaagtggggagttaatgttcaaccattaagcggggcacctgccaatttgtatgtttactccgctatcatgaacgttggtgaaagattaatgggattggatttgccagatggtggtcacttgtctcacgggtaccaacttaagtcaggaacgccaatttctttcatttccaaatacttccaaagtatgccataccatgtcgaccacactacggggctaatcgattacgataacttgcaagtattggccaaggcattcagaccaaaggtgatcgtggccggtacttccgcgtactcgagattaatagactacgctagattcaaggaaatttcccaaggatgcggcgcatatttgatgagtgatatggcacacatatccggtttggtggcagccaatgttgtcccatctccatttgaacattccgatatagttaccacaaccactcacaagtccttgagaggcccaagaggtgctatgattttcttcagaaagggtatcaagtctgtcaccaaaaagggcaaggaaatcccatatgagttagaaaagaaaatcaacttctcagttttcccaggacatcaaggtggtcctcacaaccatactatcggtgcaatggcagtggcattaaagcaagcgatgtctccagaattcaaagaataccaacaaaaaattgtcgacaacagcaaatggtttgctcaggaactaaccaagatgggttataagttggtttccggcggtaccgataaccacttgattgttattgacttatccggtactcaggtagacggtgctcgtgtcgagacaattttaagtgccttgaacattgctgctaacaagaacaccatcccaggtgataagagtgctcttttcccctctggtctaagaatcggtactccagcaatgaccacgagaggatttggccgtgaagagttttctcaagtcgcaaagtacattgattctgccgtaaagctcgctgaaaatttgaaaactttggaaccaacaacgaaactagatgcaagatcaagactcaatgagttcaagaagttgtgtaatgaatctagtgaagtcgctgctttgtctggcgagatttccaagtgggtcggtcaataccctgtcccaggtgatatctaa

SEQ ID NO: 9780 - protein, 490 aa, Saccharomyces cerevisiae
MFPRASALAKCMATVHRRGLLTSGAQSLVSKPVSEGDPEMFDILQQERHRQKHSITLIPSENFTSKAVMDLLGSELQNKYSEGYPGERYYGGNEIIDKSESLCQARALELYGLDPAKWGVNVQPLSGAPANLYVYSAIMNVGERLMGLDLPDGGHLSHGYQLKSGTPISFISKYFQSMPYHVDHTTGLIDYDNLQVLAKAFRPKVIVAGTSAYSRLIDYARFKEISQGCGAYLMSDMAHISGLVAANVVPSPFEHSDIVTTTTHKSLRGPRGAMIFFRKGIKSVTKKGKEIPYELEKKINFSVFPGHQGGPHNHTIGAMAVALKQAMSPEFKEYQQKIVDNSKWFAQELTKMGYKLVSGGTDNHLIVIDLSGTQVDGARVETILSALNIAANKNTIPGDKSALFPSGLRIGTPAMTTRGFGREEFSQVAKYIDSAVKLAENLKTLEPTTKLDARSRLNEFKKLCNESSEVAALSGEISKWVGQYPVPGDI

SEQ ID NO: 9781 - DNA, 1410 bp, Saccharomyces cerevisiae
  CDS (1)..(1410)
atgccttacactctatccgacgctcatcataagttgatcacctctcatttggtggacaccgaccctgaagtggactccattatcaaggatgaaattgaaagacaaaagcactccatcgatttgattgcttctgaaaatttcacctcaacctccgttttcgatgcccttggaactccattgtccaacaaatactctgaaggttatccaggtgctcgttactacggtggtaatgaacacattgacagaatggaaattctatgtcaacaaagagctttgaaagctttccatgttactccagacaaatggggtgttaacgtccaaactttatctggttctcctgctaacttgcaggtttatcaagctattatgaagcctcatgaaagattgatgggtctatacctaccagatggtggtcatttgtctcacggttacgctactgaaaacagaaaaatttctgctgtttccacatacttcgaatctttcccatacagagttaacccagaaaccggtattatcgactacgatactttagaaaagaacgccatcctatatagaccaaaggttcttgttgctggtacttcagcatactgtcgtttaattgactacaagagaatgagagaaatcgccgacaaatgtggtgcttacttgatggtagacatggcccacatttctggtttgatcgccgcaggtgtcatcccatctcctttcgaatacgctgatatcgttaccaccaccactcacaagtctttgagaggtccacgtggtgctatgattttcttcagaagaggtgtgagatctatcaaccctaagaccggtaaggaagttctatacgacttggaaaacccaattaacttctctgttttcccaggtcaccaaggtggtccacacaaccataccattgctgctttggccactgctttgaagcaagctgccactccagaattcaaggaataccaaactcaagtcttgaagaatgctaaggctttggaaagtgaatttaagaacttgggctacagattagtttccaacggtaccgattctcacatggttctagtatccttgagagaaaagggtgttgatggtgctcgtgttgaatacatttgtgaaaagattaacattgctttgaacaaaaactctattccaggtgacaaatctgctttggttccaggtggtgtccgtattggggctccagccatgaccactagaggaatgggtgaagaagatttccacagaattgttcaatacattaacaaggctgtagaattcgctcaacaagttcaacaaagcttgccaaaggatgcttgtagattaaaggacttcaaagccaaggtcgacgaaggctctgatgttttgaacacctggaaaaaggaaatttacgactgggctggcgaatacccattggctgtgtaa

SEQ ID NO: 9782 - protein, 469 aa, Saccharomyces cerevisiae
MPYTLSDAHHKLITSHLVDTDPEVDSIIKDEIERQKHSIDLIASENFTSTSVFDALGTPLSNKYSEGYPGARYYGGNEHIDRMEILCQQRALKAFHVTPDKWGVNVQTLSGSPANLQVYQAIMKPHERLMGLYLPDGGHLSHGYATENRKISAVSTYFESFPYRVNPETGIIDYDTLEKNAILYRPKVLVAGTSAYCRLIDYKRMREIADKCGAYLMVDMAHISGLIAAGVIPSPFEYADIVTTTTHKSLRGPRGAMIFFRRGVRSINPKTGKEVLYDLENPINFSVFPGHQGGPHNHTIAALATALKQAATPEFKEYQTQVLKNAKALESEFKNLGYRLVSNGTDSHMVLVSLREKGVDGARVEYICEKINIALNKNSIPGDKSALVPGGVRIGAPAMTTRGMGEEDFHRIVQYINKAVEFAQQVQQSLPKDACRLKDFKAKVDEGSDVLNTWKKEIYDWAGEYPLAV

SEQ ID NO: 9783 - DNA, 1800 bp, Arabidopsis thaliana
  CDS (1)..(1800)
atggaccgtatagctcaatcagatctctctttaggattcggtagctcccacgctttacctctacctcatcctcctagaatcccaatcgctgatgactcaatcacgcttcagattgattccagcttccgtccttcgtctaatcctatgcctcctgttcctcttcagttacttgagcagagattcgatgtcaccggatcctgtagccgagttgttgaggaggacgatgaggttgttggtgataatgatgatgatgatcaaagagaagaggagcaatttattctcttgggtcatcctatgaagttgaaacgaggtagaggtgggaattcgtattcattggcatcatcaagtccttgtaagagatttgtagttgattcagggattgaaagtaggcgagctgttgttagagcttggggtaatcagtcgattgaagaagctgatcctgagattcatgagtttatggaaaaggagaagcagagacaatttagaggtattgagcttatagcttctgagaatttcgtgtgtagagctgtgatggaagctttaggaagtcatttgactaataagtactctgaaggaatgcctggagctagatactatacggggaatcagtatattgatcagattgagattctttgccaagagcgtgcgcttgcagcttttggactaaatcatgagaaatggggagttaatgtgcagccttattcgtgcacttctgccaatttcgctgttttcactggtcttttgatgcccggtgaacgaattatgggattggattctccctcaggtggtcatatgagtcatgggtattatacaccaggtgggaagaaagtctctggtgcgtctatattctttgagagctttccatataaggttgaccctcgtacagggtatattgattacgataagcttgaggaaaaggcgcttgactatcgtcctaagatacttatttgtggtgggagttcatatccgagggactgggaattccctaggtttaggcatattgcagacaaatgtggagctgttttgatgtttgacatggcacagattagtggtcttgtcgctgccaaggaaagtccaaatccattcgattattgcgatattgttacctcaacaacacacaagtctctccgtggccctaggggcggcatcatattttacaagagaggcttgaagcccaagaagcaaagcataaatcttaatcactgtgagagcaatatccagtatgattttgaagaaaaaatcaacttttctgtctttccatcgttgcaaggggggcctcacaataaccatatagctgctctagccattgccctcaagcaggccgcttcaccagagtacaagctttacatgcgacaggtcaaaaaaaatgctaaggctttagcatctgctttgataagcagaaagtgcaagctgataacaggtggcaccgataatcatttgcttctctgggatctgactcctttgggcttgacaggcaaggtgtatgagaaagtttgcgagatgtgccatatcacggtcaacaaagtggccattttcagcgaaaacggtgttatttcccctggaggagtgagaataggcagtccggctatgacctcaagaggttgtttagaaccagaatttgagacaatggctgattttctatatagagctgctcagatagctagtgctgcacaaagggaacacgggaagttgcaaaaggaaccgctcaaaagcatctatcactgtaaagagattgcagatcttcggaaccaagtcgaagcttttgctactcagtttgcaatgcctgcctttgacatgtga

SEQ ID NO: 9784 - protein, 599 aa, Arabidopsis thaliana
MDRIAQSDLSLGFGSSHALPLPHPPRIPIADDSITLQIDSSFRPSSNPMPPVPLQLLEQRFDVTGSCSRVVEEDDEVVGDNDDDDQREEEQFILLGHPMKLKRGRGGNSYSLASSSPCKRFVVDSGIESRRAVVRAWGNQSIEEADPEIHEFMEKEKQRQFRGIELIASENFVCRAVMEALGSHLTNKYSEGMPGARYYTGNQYIDQIEILCQERALAAFGLNHEKWGVNVQPYSCTSANFAVFTGLLMPGERIMGLDSPSGGHMSHGYYTPGGKKVSGASIFFESFPYKVDPRTGYIDYDKLEEKALDYRPKILICGGSSYPRDWEFPRFRHIADKCGAVLMFDMAQISGLVAAKESPNPFDYCDIVTSTTHKSLRGPRGGIIFYKRGLKPKKQSINLNHCESNIQYDFEEKINFSVFPSLQGGPHNNHIAALAIALKQAASPEYKLYMRQVKKNAKALASALISRKCKLITGGTDNHLLLWDLTPLGLTGKVYEKVCEMCHITVNKVAIFSENGVISPGGVRIGSPAMTSRGCLEPEFETMADFLYRAAQIASAAQREHGKLQKEPLKSIYHCKEIADLRNQVEAFATQFAMPAFDM

SEQ ID NO: 9785 - DNA, 1413 bp, Arabidopsis thaliana
  CDS (1)..(1413)
atggaaccagtctattcttggggaaacacgcatcttgacttcgtcgatccggagatctacgacctaatcgagaaggagaaacatcgtcaatgtcgaggaatcgaactcatagcagccgagaatttcacttccgtggccgtcatggaagctctcggaagttgcttaaccaacaaatactcggaaggtatgcctggtaatcgttactacggaggtaccgagttcatcgatgagatagagagtctctgccgctcacgctctctcgaagccttccattgcaatccagagaaatggggcgttaacgttcagccttactctggttcccctgcgaatttcgcagcctacaccgccttgctccagcctcatgatcgtatcatggggcttgatttgccatcaggtggtcatataacgcatggttactatagctctggtgggaagaacatctccgcgacctcgatctactttgaaaaccttccctacaaggtggattccaagactggttacattgattacgacaaacttgaggagaaagctatggattttaggcctaagttaattatctgtggaggcacttcttaccctagggaatgggattacgcgagattcagggctgtcgccgacaaggttggagcttttttgctctgtgatatggctcataacagtgccctcgttgctgctcaggaagccgcagacccgttcgagtactgtgacgttgtgacaacgtcaactcacaagagcttgagaggtccaagggctggtatgatcttttatagaaagggaccaaaaccagccaagaagggccaacccgagggtgaagtctacgatttcgacgcaaaaatcaactctgcggtattccctgcgcttcaaagtggtcctcacaataacaagattggtgctctagctgttgcgttgaagcaggttatggctcctagcttcaaagtttatgcaaaacaggtgaaagctaatgctgcttgccttgcaagctacctaataaataagggatatactcttgtaaccgatggaactgataaccaccttattctttgggatcttcgccctcttggattgaccggtaacaaggttgagaaggtttgtgaattgtgctacattactttgaacaggaatgcggtattcggagacactagttttcttgctcccggaggtgtaagaatcggtacaccggcgatgacatcgagaggattggtggagaaggactttgagaagataggagagttcctgcaccgtgccgtgacaatcacgttggacatccaggagcagtacggtaaggtgatgaaggacttcaacaagggtttggtgaacaacaaggagatcgatgagataaaggctgacgttgaggagttcacgtacgattttgatatgcctggatttttcatctctgagtcaaggaacgattag

SEQ ID NO: 9786 - protein, 470 aa, Arabidopsis thaliana
MEPVYSWGNTHLDFVDPEIYDLIEKEKHRQCRGIELIAAENFTSVAVMEALGSCLTNKYSEGMPGNRYYGGTEFIDEIESLCRSRSLEAFHCNPEKWGVNVQPYSGSPANFAAYTALLQPHDRIMGLDLPSGGHITHGYYSSGGKNISATSIYFENLPYKVDSKTGYIDYDKLEEKAMDFRPKLIICGGTSYPREWDYARFRAVADKVGAFLLCDMAHNSALVAAQEAADPFEYCDVVTTSTHKSLRGPRAGMIFYRKGPKPAKKGQPEGEVYDFDAKINSAVFPALQSGPHNNKIGALAVALKQVMAPSFKVYAKQVKANAACLASYLINKGYTLVTDGTDNHLILWDLRPLGLTGNKVEKVCELCYITLNRNAVFGDTSFLAPGGVRIGTPAMTSRGLVEKDFEKIGEFLHRAVTITLDIQEQYGKVMKDFNKGLVNNKEIDEIKADVEEFTYDFDMPGFFISESRND

SEQ ID NO: 9787 - DNA, 1416 bp, Arabidopsis thaliana
  CDS (1)..(1416)
atggaaccagtctcttcatggggtaacacctctctcgtctccgtagatccagagatccacgacctaatcgagaaggagaaacgtcggcaatgtcgaggaatcgaacttatcgcttccgagaatttcacttccttcgccgtcatcgaagctctcggaagtgccttaaccaacaaatactccgaaggtattcctggtaatcgttattacggaggtaacgaattcatcgatgagatcgagaatctttgccgttcaagagctctcgaagctttccattgtgatccagcagcgtggggcgttaatgttcagccgtattctggatctccggcaaatttcgctgcttacacggctttgcttcagcctcacgatcgtatcatggggcttgatttgccttcaggtggtcatttgactcatggttactatacatctggtggtaagaagatctctgcgacttcgatctactttgagagtcttccgtataaggtgaatttcaccactggttacattgattacgataagcttgaagagaaggcgttggatttcaggcctaagttgcttatctgtggtggtagtgcgtatcctagggattgggattacgctagatttagagctattgctgataaggttggagctcttttgctttgtgacatggctcacatcagtggtctcgttgctgctcaggaagctgcaaacccatttgagtactgtgacgttgtgacaaccacaacccacaagagtttgaggggtccaagggctggtatgattttctacaggaagggtccaaaaccaccaaagaagggtcaacccgagggtgcagtctatgattttgaggacaaaatcaactttgctgtattccctgcgcttcaaggtggtcctcacaatcaccagattggtgctctagctgttgcgttgaagcaggctaatactcctgggttcaaggtctacgcaaaacaagtgaaagccaatgctgttgcccttggaaactacctaatgagcaagggttaccagattgtgaccaatggaactgagaaccaccttgttctctgggatcttcgccctcttggattgaccggaaacaaggttgagaagctctgcgatctgtgcagcattacattgaacaagaacgcagtatttggagacagtagtgctcttgctcctggaggtgtaagaatcggtgcacccgcgatgacatcgagaggattggtggagaaggactttgagcagataggagaattcctgagccgtgcagtgacactgacgttggacatccaaaagacatacggtaagttgttgaaggacttcaacaagggtttggtgaacaacaaagatctcgatcagctcaaggctgatgtcgagaagttctcggcgtcttatgagatgcctggattcctcatgtctgagatgaagtacaaggattag

SEQ ID NO: 9788 - protein, 471 aa, Arabidopsis thaliana
MEPVSSWGNTSLVSVDPEIHDLIEKEKRRQCRGIELIASENFTSFAVIEALGSALTNKYSEGIPGNRYYGGNEFIDEIENLCRSRALEAFHCDPAAWGVNVQPYSGSPANFAAYTALLQPHDRIMGLDLPSGGHLTHGYYTSGGKKISATSIYFESLPYKVNFTTGYIDYDKLEEKALDFRPKLLICGGSAYPRDWDYARFRAIADKVGALLLCDMAHISGLVAAQEAANPFEYCDVVTTTTHKSLRGPRAGMIFYRKGPKPPKKGQPEGAVYDFEDKINFAVFPALQGGPHNHQIGALAVALKQANTPGFKVYAKQVKANAVALGNYLMSKGYQIVTNGTENHLVLWDLRPLGLTGNKVEKLCDLCSITLNKNAVFGDSSALAPGGVRIGAPAMTSRGLVEKDFEQIGEFLSRAVTLTLDIQKTYGKLLKDFNKGLVNNKDLDQLKADVEKFSASYEMPGFLMSEMKYKD

SEQ ID NO: 9789 - DNA, 1287 bp, Aquifex aeolicus VF5
  CDS (1)..(1287): transl_table=11
atggaacaccttctgaaaacggaccccgaggtttttgacgctgttgtaaaggagtacgaaaggcagttttataacctggaaatgatagcctcagagaacttcacttccctcgcggtaatggaagcgacgggaagcgtcctcacgaacaagtacgcggaaggacttccgggaaagaggtattacggaggctgtgagtacgtagatgtagttgaaaatctcgccatagaaagagcaaaaaaactcttcggagcggagcacgcaaacgttcagccccactcgggttctcaggcgaacatggcggtgtactttgccgttctaaaccccggtgacaccataatgggaatggatttggcccacggaggacatctaacccacggagccaaggtaaacttcagcgggaaactctacaacgtaatccactacggtgtaaatccggaaacggagctcatagattacgaccagttgtacaaactggcaaaggagcacaaaccgaagttaatagtgggaggagcctcggcctatccacgcgtgtttgactgggcaaagatgagggaaatagcggacgaagtgggtgccctctttatggtcgacatggcacactacgctggtctcatagcgggaggcgtttaccccaatcccgtcccttacgcccagtttgtgacctcaacgacccataaaactctcaggggaccaaggagcggttttatcctaactacaaaggaatacgcaaaagccgtagacaagagcgtctttcccggaattcaaggtggtccattaatgcacgttatagcggcaaaggctgtagcttttaaagaggctatgagcgaagagttcaaggagtacgcaaaacaggttgtagaaaacgcaagggttctcgccgaagaactgaaaaagtacgggtttaagatagtcacgggaggaacggactctcacatagtcctcgttgacctcaggaataaaaacattatcggaaaagacgcggaaaaggctctggaaaaggctggaataacggtaaacaaaaacgcggtgccttttgaccctctaccgcctacaaagactagcgggataaggataggaacggctgcactcacaacgagggggatgaaggaagacgaaatgagaaagatagcaggctggataaatgaagtactttcaaacatggacgacgagaagaccatacagagagtaaggcaggaagtaagagagctgtgtgaaacttttcctttatatccggaactcaagaggagaatagatgagcttcgtagtggcaaggcaaccgatctttga

SEQ ID NO: 9790 - protein, 428 aa, Aquifex aeolicus VF5
MEHLLKTDPEVFDAVVKEYERQFYNLEMIASENFTSLAVMEATGSVLTNKYAEGLPGKRYYGGCEYVDVVENLAIERAKKLFGAEHANVQPHSGSQANMAVYFAVLNPGDTIMGMDLAHGGHLTHGAKVNFSGKLYNVIHYGVNPETELIDYDQLYKLAKEHKPKLIVGGASAYPRVFDWAKMREIADEVGALFMVDMAHYAGLIAGGVYPNPVPYAQFVTSTTHKTLRGPRSGFILTTKEYAKAVDKSVFPGIQGGPLMHVIAAKAVAFKEAMSEEFKEYAKQVVENARVLAEELKKYGFKIVTGGTDSHIVLVDLRNKNIIGKDAEKALEKAGITVNKNAVPFDPLPPTKTSGIRIGTAALTTRGMKEDEMRKIAGWINEVLSNMDDEKTIQRVRQEVRELCETFPLYPELKRRIDELRSGKATDL

SEQ ID NO: 9791 - DNA, 1263 bp, Rickettsia prowazekii str. Madrid E
  CDS (1)..(1263): transl_table=11
atgaatattttaaataataatttatatgaaatggataaagaaatttatgaaataatcaagaatgagaagattcgtcaaaataatgtaattgagcttattgcatcagagaattttgtaagttctgctgtattggaagctcaaggctcgattctgactaataaatatgcggaagggtatcccagtaagcgtttctataatggttgtgatgaagttgataaagctgaagtcttggctatagagcggataaagaaattatttaactgtaaatatgccaatgtgcaacctcattcaggctcgcaagcaaaccaaactgtgtatcttgctttattacaaccgtgtgatacaattcttggtatgtccttagatagcggtggacatctaacacatggtgcggcccctaatatatctggtaaatggtttaacactgtttcatatcatgtagatcaagaaacttatttaattgattatgatgaggttgaacgtttagctgtgttacataatccaaaattgcttatagcaggtttttctgcatatccgcgtaagattgattttgcaaaatttagaaaaatagcagataaagttggagcatatcttatggcagatattgctcatattgcagggcttgttgccacaggtgagcatcaaagtcctattccatatgcgcacgtagtaacctctacaactcataaaacgcttagagggccaaggggtggcttaatcttatctgatgatgaagagataggaaaaaaaataaattctgcattattcccagggttgcagggtggcccgttaatgcatataattgctgcaaaagcagtagcgtttttagaaaatttgcagcctgaatataaaaattatataaagcaggtaataagtaacgctaaagctttagcaattagcttacaagaaagaggttatgatatattaacaggtggtactgacaatcatattgttttagtggatttgcgtaaagacgggatcacaggtaagtgtgctgcaaattctttagatagagcagggattacgtgtaataagaatgctattccgtttgatacaacttcgccttttatcacttctggtattcgttttggtactcctgcatgtactactaaaggctttaaagaaaaggattttgtattaattggtcatatggtagcagagattttagatggcttaaagcataatgaagataatagtaaaactgaacagaaagtattaagtgaagtaaaaaagctaatgaaattatttccgttttatgactaa

SEQ ID NO: 9792 - protein, 420 aa, Rickettsia prowazekii str. Madrid E
MNILNNNLYEMDKEIYEIIKNEKIRQNNVIELIASENFVSSAVLEAQGSILTNKYAEGYPSKRFYNGCDEVDKAEVLAIERIKKLFNCKYANVQPHSGSQANQTVYLALLQPCDTILGMSLDSGGHLTHGAAPNISGKWFNTVSYHVDQETYLIDYDEVERLAVLHNPKLLIAGFSAYPRKIDFAKFRKIADKVGAYLMADIAHIAGLVATGEHQSPIPYAHVVTSTTHKTLRGPRGGLILSDDEEIGKKINSALFPGLQGGPLMHIIAAKAVAFLENLQPEYKNYIKQVISNAKALAISLQERGYDILTGGTDNHIVLVDLRKDGITGKCAANSLDRAGITCNKNAIPFDTTSPFITSGIRFGTPACTTKGFKEKDFVLIGHMVAEILDGLKHNEDNSKTEQKVLSEVKKLMKLFPFYD

SEQ ID NO: 9793 - DNA, 1284 bp, Thermotoga maritima MSB8
  CDS (1)..(1284): transl_table=11
atgtggaagcatgtaaaacaggttgatcccgaaatatacgaagttcttgtgaacgagttgaagcgtcaggagtacggcctggagctgatcgcctctgagaacttcgcgtcactcgctgtcatagaaaccatgggaagcatgctcaccaacaagtatgcggaaggatacccgaagaagagatactacggtggctgcgagtgggtggatcgagcagaagaacgtgctatagagagagcgaagaggttgtttggagccaaatttgcgaacgttcagccgcactccggttctcaggcgaacatggcggtttatctggcactcgcccagcccggagacacgatcatgggaatgtccctgtcacacgggggacatctcacccatggagcaccggtgaatttctcagggaagatcttcaaggtggtaccttacggagtcaatctggaaacggaaacgatagattacgatgaggtcagaagactcgctctggaacacaagccgaagataatcgttgcgggtggaagtgcttacgccaggatcatcgatttcaaaagattcagagagatagccgatgaggtgggagcatatttgatggtggatatggctcactttgccggactcgtcgctgctggaattcatccaaatcccttggaatacgcccacgtggtgacttccaccacacacaagactctcaggggccccagaggtggtttgatactcacgaacgatccggagatcgccaaagccgtggataaaactatcttccccggtatccagggtggtcctctcatgcacgtcatagcggcgaaagctgtctgtttcaaagaagccatgacggaggagttcaaagagtaccagaagcaggtggtcaaaaatgctaaaaagatggctgaagagttccagaaacgaggttacaggatcgtttctggaggaactgatacacacctgttcctggtggatctcacaccaaaagacataacgggtaaagcggcggaaaaggccctggaaagctgtggtatcacagtgaacaaaaacaccattcccaacgaaaagagatctccgttcgtggcgagcggtatcagaataggaacacccgctgttacaacccgcggaatgaaggaagaagagatggaagagatcgccgagatgatagatctggttctttcgaacgtgatcgatgaaaacggaacggtgaaaccagaggtgagggaagaggtttcaaagaaggtaagggagctctgcgaaaggtttcctctgtaccgtgacaagatcgaaggggtggaaatatga

SEQ ID NO: 9794 - protein, 427 aa, Thermotoga maritima MSB8
MWKHVKQVDPEIYEVLVNELKRQEYGLELIASENFASLAVIETMGSMLTNKYAEGYPKKRYYGGCEWVDRAEERAIERAKRLFGAKFANVQPHSGSQANMAVYLALAQPGDTIMGMSLSHGGHLTHGAPVNFSGKIFKVVPYGVNLETETIDYDEVRRLALEHKPKIIVAGGSAYARIIDFKRFREIADEVGAYLMVDMAHFAGLVAAGIHPNPLEYAHVVTSTTHKTLRGPRGGLILTNDPEIAKAVDKTIFPGIQGGPLMHVIAAKAVCFKEAMTEEFKEYQKQVVKNAKKMAEEFQKRGYRIVSGGTDTHLFLVDLTPKDITGKAAEKALESCGITVNKNTIPNEKRSPFVASGIRIGTPAVTTRGMKEEEMEEIAEMIDLVLSNVIDENGTVKPEVREEVSKKVRELCERFPLYRDKIEGVEI

SEQ ID NO: 9795 - DNA, 1251 bp, Vibrio cholerae O1 biovar El Tor str. N16961
  CDS (1)..(1251): transl_table=11
atgcttaagcgtgatatgaacatcgctgattacgatccggagctatacgctgccattcaggaagagacgcttcgtcaagaagaacatattgaacttattgcttcagaaaactacaccagcccgcgtgtaatgcaagcacaaggttctcaactgaccaacaagtacgccgaaggttatccaggtaagcgttactatggtggttgtgagtacgtggacaaagcagaagctttagcgattgatcgtgcttgccaactgtttggctgtgaatacgcgaacgttcagccgcactctggatctcaagcgaacagcgctgtgtacatggcgctgctcaacccaggtgacaccgtgctaggtatgagccttgctcacggtggtcatttgactcacggttcaccggttaacttctcgggtaagcactacaatgtgatcccttacggtatcgatgaagcgggtcaaattaactacgatgaaatggaagccttagcactggagcataagccaaagatgatcatcggtggcttctcggcttactcacaaatcgtggattggaaacgcatgcgtgaaatcgccgataaagtgggtgcttacctgtttgttgacatggcgcacgttgcgggtctgattgcggcgggtgtttacccaagcccagtgccttttgcacacgttgtcacgaccaccacgcataaaacactggcaggtccacgcggtggcttgatcttgtcaaatgccggtgaggagatgtacaagaagctgaactctgcagtattccctggcggccaaggcggtcctttgatgcacgtgattgcggctaaagcggtggcgttcaaagaagcaatggagcctgagtttaaagagtatcaagcgcgtgtggtgaaaaacgccaaagccatggtggcgcagttccaagaacgtggttacaagatcgtctctaacagcacggaaaaccatttgttccttgttgatctgattgataaaaacatcacaggtaaagaagctgatgccgctctgggcgctgccaatatcacggttaacaagaactcggtaccaaatgacccacgcagcccgtttgtgacttcaggtatccgtgtcggtacaccagcaatcactcgccgtggttttaccgagcaagacgcaaaagatctcgccaactggatgtgtgatgttctagacaacatcaatgatcaaggtgtgattgaagcgacgaaacaaaaagtattggcgatctgtcaacgtctgcctgtttacgcttaa

SEQ ID NO: 9796 - protein, 416 aa, Vibrio cholerae O1 biovar El Tor str. N16961
MLKRDMNIADYDPELYAAIQEETLRQEEHIELIASENYTSPRVMQAQGSQLTNKYAEGYPGKRYYGGCEYVDKAEALAIDRACQLFGCEYANVQPHSGSQANSAVYMALLNPGDTVLGMSLAHGGHLTHGSPVNFSGKHYNVIPYGIDEAGQINYDEMEALALEHKPKMIIGGFSAYSQIVDWKRMREIADKVGAYLFVDMAHVAGLIAAGVYPSPVPFAHVVTTTTHKTLAGPRGGLILSNAGEEMYKKLNSAVFPGGQGGPLMHVIAAKAVAFKEAMEPEFKEYQARVVKNAKAMVAQFQERGYKIVSNSTENHLFLVDLIDKNITGKEADAALGAANITVNKNSVPNDPRSPFVTSGIRVGTPAITRRGFTEQDAKDLANWMCDVLDNINDQGVIEATKQKVLAICQRLPVYA

SEQ ID NO: 9797 - DNA, 1257 bp, Pseudomonas aeruginosa PAO1
  CDS (1)..(1257): transl_table=11
atgttcagcaagcacgaccagctccagggctacgacgacgaactgctcgccgcgatggacgccgaagaccggcggcaggaagaccacatcgaactgatcgcctcggagaactacgccagcaagcgggtcatgcaggcgcagggcggcggcctgaccaacaagtatgccgagggctatccgggcaagcgttactacggcggctgcgaacacgtcgacaaggtcgagcggctggccatcgaccgcgccaggcaactgttcggcgccgactacgccaacgtccagccgcactccggttcctcggccaacgctgcggtgtacctggcgctgctcaacgccggcgacaccatcctcggcatgagcctggcccacggcggccatctcacccacggcgccaaggtgtcctcctccggcaagctgtacaacgccgtgcagtacggcctggacaccgctaccgggctgatcgactacgacgaagtcgagcgcctggccgtggagcataagccgaagatgatcgtcgccggcttctccgcctactccaagaccctcgacttcccgcgcttccgcgccatcgccgacaaggtcggcgcgctgctgttcgtcgacatggcccacgtcgccgggctggtcgccgccggcctctacccgaacccgatccccttcgccgacgtggtcaccaccaccacccacaagaccctgcgcggcccgcgcggcggcctgatcctggcgcgcgccaacgaggagatcgagaagaagctcaactccgcggtattccccggcgcccagggcggcccgctgatgcacgtgatcgcggccaaggcggtgtgcttcaaggaagcgctggagccgggcttcaaggactaccaggcgcaggtgatccgcaacgccaaggcgatggccgaggtgttcatcgggcgcggctacgacgtggtttccggtggcaccgacaaccacctgatgctgatcagcctggtgaagcaggggctgaccggcaaggccgccgacgcggcgctcggagcggcgcacatcacggtgaacaagaacgccgtgccgaacgatccgcagagcccgttcgtcacctccggcatccgcatcggcaccccagcggtgaccactcgcggtttccgcgagggcgagtgccgagaactggctggctggatctgcgacatcctcgacgatatcgacaatcccgaggtcggcgaacgggtcaggggccaggtcggcgaattctgccggcacttcccggtctacgctgattga

SEQ ID NO: 9798 - protein, 418 aa, Pseudomonas aeruginosa PAO1
MFSKHDQLQGYDDELLAAMDAEDRRQEDHIELIASENYASKRVMQAQGGGLTNKYAEGYPGKRYYGGCEHVDKVERLAIDRARQLFGADYANVQPHSGSSANAAVYLALLNAGDTILGMSLAHGGHLTHGAKVSSSGKLYNAVQYGLDTATGLIDYDEVERLAVEHKPKMIVAGFSAYSKTLDFPRFRAIADKVGALLFVDMAHVAGLVAAGLYPNPIPFADVVTTTTHKTLRGPRGGLILARANEEIEKKLNSAVFPGAQGGPLMHVIAAKAVCFKEALEPGFKDYQAQVIRNAKAMAEVFIGRGYDVVSGGTDNHLMLISLVKQGLTGKAADAALGAAHITVNKNAVPNDPQSPFVTSGIRIGTPAVTTRGFREGECRELAGWICDILDDIDNPEVGERVRGQVGEFCRHFPVYAD

SEQ ID NO: 9799 - DNA, 1254 bp, Pseudomonas aeruginosa PAO1
  CDS (1)..(1254): transl_table=11
atgttcagccgtgatttgaccctcgcccgctacgatgccgaactctttgccgcgatggagcaggaagcccagcgccaggaagagcacatcgagctgatcgcctccgagaactacaccagcccggcggtgatggaagcccagggttcggtgctgaccaacaagtacgccgaaggttatccgcacaagcgctactacggcggctgcgagtacgtcgatatcgtcgagcaactggccatcgaccgcgccaagcaactgttcggcgccgattacgccaacgtccagccgcacgccggctcccaggccaacgccgcggtctacctggccctgctgtcggccggcgacaccatcctcggcatgagcctggcccatggcggccacctgacccacggcgccagcgtctcctcctccggcaagctgtacaacgccgtgcagtacggcatcgacgccaatggcctgatcgactacgacgaagtcgagcgcctggccgtggagcacaagccgaagatgatcgtcgccggcttctccgcctattcccaggtcctcgatttcgcccgcttccgcgccatcgccgacaaggtcggcgcctacctgttcgtcgacatggcccacgtcgccggcctggtcgccgctggcgtctacccgaacccggtgccgttcgccgacgtggtcaccaccaccacccacaagaccctgcgcggtccgcgcggtggcctgatcctggcgcgcgccaacgaggagatcgagaagaagctcaactccgcggtattccccagcgcccagggcggtccgctggagcacgtgatcgcggccaaggcggtgtgcttcaaggaagccctgcagccggagttcaagacctaccagcagcaggtcctgaagaacgcccagagcatggcccaggtcttcctggaccgcggtttcgacgtggtttccggcggcacccagaaccacctgttcctgctctccctgatcaagcaggacatcaccggcaaagacgccgacgccgccctcggccgcgcgttcatcaccgtgaacaagaactcggtcccgaacgacccgcgctcgccgttcgtcacctccggcctgcgcatcggtaccccggccgtgaccacccgcggcttcaaggaagccgagtgccgcgagctggccggctggatctgcgacatcctcgagaacatgggcgacgagtccgtggtcgacggcgtacgcgagaaggtcaaggcgatctgcgccaagttcccggtctacggcaactaa

SEQ ID NO: 9800 - protein, 417 aa, Pseudomonas aeruginosa PAO1
MFSRDLTLARYDAELFAAMEQEAQRQEEHIELIASENYTSPAVMEAQGSVLTNKYAEGYPHKRYYGGCEYVDIVEQLAIDRAKQLFGADYANVQPHAGSQANAAVYLALLSAGDTILGMSLAHGGHLTHGASVSSSGKLYNAVQYGIDANGLIDYDEVERLAVEHKPKMIVAGFSAYSQVLDFARFRAIADKVGAYLFVDMAHVAGLVAAGVYPNPVPFADVVTTTTHKTLRGPRGGLILARANEEIEKKLNSAVFPSAQGGPLEHVIAAKAVCFKEALQPEFKTYQQQVLKNAQSMAQVFLDRGFDVVSGGTQNHLFLLSLIKQDITGKDADAALGRAFITVNKNSVPNDPRSPFVTSGLRIGTPAVTTRGFKEAECRELAGWICDILENMGDESVVDGVREKVKAICAKFPVYGN

SEQ ID NO: 9801 - DNA, 1254 bp, Pseudomonas aeruginosa PAO1
  CDS (1)..(1254): transl_table=11
atgttcagcaagcatgaccagatccgcggctacgacgacgaactgctcgccgcgatggacgccgaagaggcccgccaggaagaccatctcgaactgatcgcctcggagaactacaccagcaagcgggtcatgcaggcgcagggcagcggcctgaccaacaagtatgccgagggctatccgggcaagcgctactacggcggctgcgaacacgtcgacaaggtcgagcggctggccatcgaccgcgccaggcaactgttcggcgccgactacgccaacgtccagccgcactccggttcctcggccaacgctgcggtgtacctggcgctgctcaacgccggcgacaccatcctcggcatgagcctggcccacggcggccatctcacccacggcgccaaggtgtcctcctccggcaagctttacaacgccgtgcagtacggcctggacaccgctaccgggctgatcgactacgacgaagtcgagcgcctggccgtggagcataagccgaagatgatcgtcgccggcttctccgcctactccaagaccctcgacttcccgcgcttccgcgccatcgccgacaaggtcggcgcgctgctgttcgtcgacatggcccacgtcgccgggctggtcgccgccggcctctacccgaacccgatccccttcgccgacgtggtcaccaccaccacccacaagaccctgcgcggcccgcgcggcggcctgatcctggcgcgcgccaacgaggagatcgagaagaagctcaactccgcggtatttcccggcgcccagggcggcccgctgatgcacgtgatcgcggccaaggcggtgtgcttcaaggaagcgctggagccgggcttcaaggactaccaggcgcaggtgatccgcaacgccaaggcgatggccgaggtgttcatcgggcgcggctacgacgtggtttccggtggcaccgacaaccacctgatgctgatcagcctggtgcgccagggcctgaccggcaaggaagccgacgccgccctcggccgggtcggcatcacggtgaacaagaacgccgtgccgaacgatccgcagagcccgttcgtcacctccggcatccgcatcggcaccccggccatcaccacccgcgggctgcaggaagcgcagagccgcgaactggccggctggatctgcgacatcctcgaccacctcggcgatgccgacgtggaggccaaggtcgccacccaggtcgccggtctctgcgcggacttcccggtctatcgctga

SEQ ID NO: 9802 - protein, 417 aa, Pseudomonas aeruginosa PAO1
MFSKHDQIRGYDDELLAAMDAEEARQEDHLELIASENYTSKRVMQAQGSGLTNKYAEGYPGKRYYGGCEHVDKVERLAIDRARQLFGADYANVQPHSGSSANAAVYLALLNAGDTILGMSLAHGGHLTHGAKVSSSGKLYNAVQYGLDTATGLIDYDEVERLAVEHKPKMIVAGFSAYSKTLDFPRFRAIADKVGALLFVDMAHVAGLVAAGLYPNPIPFADVVTTTTHKTLRGPRGGLILARANEEIEKKLNSAVFPGAQGGPLMHVIAAKAVCFKEALEPGFKDYQAQVIRNAKAMAEVFIGRGYDVVSGGTDNHLMLISLVRQGLTGKEADAALGRVGITVNKNAVPNDPQSPFVTSGIRIGTPAITTRGLQEAQSRELAGWICDILDHLGDADVEAKVATQVAGLCADFPVYR

SEQ ID NO: 9803 - DNA, 1245 bp, Campylobacter jejuni subsp. jejuni NCTC 11168
  CDS (1)..(1245): transl_table=11
atgagtttagaaatgtttgataaagaaatttttgatttaacaaacaaagagttagagcgtcaatgtgaaggtcttgaaatgatagcgagtgaaaatttcactttacctgaagtaatggaagttatgggaagtatcttgacaaacaaatacgcagaaggttatccgggtaaaagatattatggtggttgtgaatttgttgatgagattgaaactctagctattgaaagatgtaaaaaactttttaattgtaaatttgctaatgttcagcctaattcaggttctcaagctaatcaaggtgtttatgcggctttgattaatccaggtgataaaattttaggaatggatttaagtcatggcggacatttaactcatggtgcaaaagtaagttcttcgggcaaaatgtatgaaagctgtttttacggcgtagaacttgatggaagaattgattatgaaaaagtaagagaaattgctaaaaaagaaaaaccaaaacttatagtttgtggagctagtgcttatgcaagagtgattgattttgctaaatttagagaaattgctgatgaaataggtgcctatctttttgctgatatagcacatattgcaggtcttgttgtggcaggtgagcatccaagtccttttccatacgctcatgtagtaagctcaactacacataaaactttgcgtggcccaagaggtggtattattatgacaaatgatgaagagcttgctaaaaaaattaattctgccatttttccaggtattcaaggtggtcctttgatgcatgtaattgctgcaaaagcagtaggatttaaatttaatcttagcgatgagtggaaagtttatgcaaaacaagtaagaactaatgctcaagttttagctaatgttttaatggatagaaaatttaaacttgttagcgatggaacggataatcaccttgttttaatgagttttttagatcgtgaatttagtggaaaagatgcagatttagctcttggaaatgcaggtattactgcaaataaaaataccgttccaggagagattagaagtccttttatcacaagtggattaagacttggaactccagcccttactgccagaggttttaaagaaaaagaaatggaaattgtgtcaaattatattgcagatattttagatgatgttaataatgaaaaattacaagagaatattaaacaagaattaaaaaaacttgcaagtaattttattatttatgaaagggctatgttttga

SEQ ID NO: 9804 - protein, 414 aa, Campylobacter jejuni subsp. jejuni NCTC 11168
MSLEMFDKEIFDLTNKELERQCEGLEMIASENFTLPEVMEVMGSILTNKYAEGYPGKRYYGGCEFVDEIETLAIERCKKLFNCKFANVQPNSGSQANQGVYAALINPGDKILGMDLSHGGHLTHGAKVSSSGKMYESCFYGVELDGRIDYEKVREIAKKEKPKLIVCGASAYARVIDFAKFREIADEIGAYLFADIAHIAGLVVAGEHPSPFPYAHVVSSTTHKTLRGPRGGIIMTNDEELAKKINSAIFPGIQGGPLMHVIAAKAVGFKFNLSDEWKVYAKQVRTNAQVLANVLMDRKFKLVSDGTDNHLVLMSFLDREFSGKDADLALGNAGITANKNTVPGEIRSPFITSGLRLGTPALTARGFKEKEMEIVSNYIADILDDVNNEKLQENIKQELKKLASNFIIYERAMF

SEQ ID NO: 9805 - DNA, 1254 bp, Escherichia coli O157:H7 EDL933
  CDS (1)..(1254): transl_table=11
atgttaaagcgtgaaatgaacattgccgattatgatgccgaactgtggcaggctatggagcaggaaaaagtacgtcaggaagagcacatcgaactgatcgcctccgaaaactacaccagcccgcgcgtaatgcaggcgcagggttctcagctgaccaacaaatatgctgaaggttatccgggcaaacgctactacggtggttgcgagtatgttgatatcgttgaacaactggcgatcgatcgtgcgaaagaactgttcggcgctgactacgctaacgtccagccgcactccggctcccaggctaactttgcggtctacaccgcgctgctggaaccaggtgataccgttctgggtatgaacctggcgcatggcggtcacctgactcacggttctccggttaacttctccggtaaactgtacaacattgttccttacggtattgatgctaccggtcatatcgactacgccgatctggaaaaacaagccaaagaacacaaaccgaaaatgattatcggtggcttctctgcatattccggcgtggtggactgggcgaaaatgcgtgaaatcgctgacagcatcggcgcttacctgttcgttgatatggcgcacgttgcgggcctggttgctgctggcgtctacccgaacccggttcctcatgctcacgttgttactaccaccactcacaaaaccctggcgggtccgcgcggcggtctgatcctggcgaaaggtggtagcgaagagctgtacaaaaaactgaactctgccgttttccctggtggtcagggcggtccgttgatgcacgtaatcgccggtaaagcggttgctctgaaagaagcgatggagcctgagttcaaaacttaccagcagcaggtcgctaaaaacgctaaagcgatggtagaagtgttcctggaacgcggctacaaagtggtttccggcggtactgataaccatctgttcctggttgatctggtcgataaaaacctgaccggtaaagaagcagacgccgctctgggccgtgctaacatcaccgtcaacaaaaacagcgtaccgaacgatccgaagagcccgtttgtgacctccggtattcgcgtgggtactccggcaattacgcgtcgcggcttcaaagaagtagaagcgaaagaactggctggctggatgtgtgacgtgctggacagcatcaatgatgaagccgttatcgagcgcatcaaaggtaaagttctcgacatctgcgcacgttacccggtttacgcataa

SEQ ID NO: 9806 - protein, 417 aa, Escherichia coli O157:H7 EDL933
MLKREMNIADYDAELWQAMEQEKVRQEEHIELIASENYTSPRVMQAQGSQLTNKYAEGYPGKRYYGGCEYVDIVEQLAIDRAKELFGADYANVQPHSGSQANFAVYTALLEPGDTVLGMNLAHGGHLTHGSPVNFSGKLYNIVPYGIDATGHIDYADLEKQAKEHKPKMIIGGFSAYSGVVDWAKMREIADSIGAYLFVDMAHVAGLVAAGVYPNPVPHAHVVTTTTHKTLAGPRGGLILAKGGSEELYKKLNSAVFPGGQGGPLMHVIAGKAVALKEAMEPEFKTYQQQVAKNAKAMVEVFLERGYKVVSGGTDNHLFLVDLVDKNLTGKEADAALGRANITVNKNSVPNDPKSPFVTSGIRVGTPAITRRGFKEVEAKELAGWMCDVLDSINDEAVIERIKGKVLDICARYPVYA

SEQ ID NO: 9807 - DNA, 1311 bp, Deinococcus radiodurans R1
  CDS (1)..(1311): transl_table=11
gtgcccggcgttgccgtaagtagagggccgttctttctggacaccccacagtcagctgggggccgcaggctttaccatctgttcatgaccactgccgaccagcctcaggccgtccgcgacgacgcggtcttcgacctgattgcccaggaagccgagcgccagcgcaccggccttgagctgattgcctccgagaacttcacctccgccgccgtgcgcgaggcccagggcagcgtgctgaccaacaagtacgccgagggctaccccggcaagcgctggtacggcggctgtgaagtggtggatcaggtggagcagctcgccatcgaccgcgtcaagcagctctttaacgccgagtgggccaacgtgcagccgcactcgggctcgagcgccaacctcgcggtgtacaacgccctgattcagcccggcgacacggtgctcggcatggacctttcgcacggcgggcacctgacacacggcaacaaggccaacttctcggggatgcgctaccagatggtcgcttaccagcttgaccgcgaaaccgagcgcatcgacatggaagaagtgcgccgcctcgcccacgagcacaagcccaagatgattattgccggggcgagcgcctacagccgcgtcatcgactttgccgccttccgcgaaattgccgatgaggtgggcgccctgctcttcgccgacatcgcccacatcgcgggcctgatcgcggcaggcgaacaccccaacgcgctgccgcacgcgcacgtcgtcgcctcgaccacccacaagaccctgcgcgggccacgcggcggcatcatcctggcgaacgaccccgaaatcgccaagcagctcgaccgcacggtgtttcccggctaccagggcggccccctcgaacacgtcatcgcggccaaggcggtggccttcggtgaggcgctgcgtcccgagttcaaggactatgcccggcagatcatcaagaatgcccaggcgctggcgggcgagttccagcaaaagggctaccgcgtcgtctcgggcggcaccgacaaccacctttttctgctcgacctgcgcccccaggggctgaacggcaccaaggcgacgcggctgctcgacgccaaccacatcaccatttccaagtccaccctgccctacgacaccgagaaaatcctgcacggcggcggcatccgcatcggcacgcccgccgtcaccacgcgcggcatgaccgaagcgcacatgacgcaggtggccgacctgattgaccgtgccctgaaaggcgaggacgtgcaggccaaggtccacgactttgccggtggcttcccactgccctga

SEQ ID NO: 9808 - protein, 436 aa, Deinococcus radiodurans R1
MPGVAVSRGPFFLDTPQSAGGRRLYHLFMTTADQPQAVRDDAVFDLIAQEAERQRTGLELIASENFTSAAVREAQGSVLTNKYAEGYPGKRWYGGCEVVDQVEQLAIDRVKQLFNAEWANVQPHSGSSANLAVYNALIQPGDTVLGMDLSHGGHLTHGNKANFSGMRYQMVAYQLDRETERIDMEEVRRLAHEHKPKMIIAGASAYSRVIDFAAFREIADEVGALLFADIAHIAGLIAAGEHPNALPHAHVVASTTHKTLRGPRGGIILANDPEIAKQLDRTVFPGYQGGPLEHVIAAKAVAFGEALRPEFKDYARQIIKNAQALAGEFQQKGYRVVSGGTDNHLFLLDLRPQGLNGTKATRLLDANHITISKSTLPYDTEKILHGGGIRIGTPAVTTRGMTEAHMTQVADLIDRALKGEDVQAKVHDFAGGFPLP

SEQ ID NO: 9809 - DNA, 1236 bp, Clostridium acetobutylicum ATCC 824
  CDS (1)..(1236): transl_table=11
atggattttgaaaatataaaagtaagtgattctgaagtctattctatcatagaagaagaaaatgcgagacaagaaaataatatagaacttattgcatctgaaaacttcacaagcaaagctgtaatggaagctatgggttcatatttaactaataagtatgcagaaggatatccaggaaaaagatattatggtggatgttacgtagttgataaagttgaagagcttgcacgtgaaagggcaaaaaaactttttaaagcagagcatgctaatgtacagccacattcaggttcacaagctaatatggctgtttactttgcagtattgaagccgggagacactataatgggaatgaacctaacagatggaggtcatttaactcatggaagtccagttaatttttcaggaaaactctttaatataattgcctatggtgtaagtgatgaaacagaacaaatagattatgaagcgtttagaaaaaaagccttggagtgtaagccaaagatgatagtatctggtgctagtgcatattcaagaattattgattttaagaaaataagagaaatatgcgatgaagtaggagcatatatgatggtagatatggctcatatagcaggacttgtagcagcaggacttcatccgtcaccaattccatatgctgattttgtaacaacaactactcataagactttaaggggaccaagaggcggagcaattttctgcaaggaaaagtatgcaaaggacattgataaatctgtattccctggaatgcaggggggacctttaatgcacataattgcaggaaaagcagtatgctttggagaagctttaaaggatgattttaaagattatgcacagcaaatagtaaataatgcaaaagtgtttgcagatgaacttacaaaatacggttttagaatagtttcaggtggaactgataatcaccttttattagttgatttaacgaacaaaaatataacaggaaaagatgcagaacatcttcttgattcagttggaataactgcaaacaaaaatactataccatttgagaaaaagagtccttttataacaagtggaataagaatgggtacaccttcagttacaactagaggatttaaggaagaggaaatgaaaaaagtagcgtatttcataaactatgttatagagcatagagatgaagatttaagtgaaataaggaaacaagtttcagaattatgtagtggatttcctatatataagtaa

SEQ ID NO: 9810 - protein, 411 aa, Clostridium acetobutylicum ATCC 824
MDFENIKVSDSEVYSIIEEENARQENNIELIASENFTSKAVMEAMGSYLTNKYAEGYPGKRYYGGCYVVDKVEELARERAKKLFKAEHANVQPHSGSQANMAVYFAVLKPGDTIMGMNLTDGGHLTHGSPVNFSGKLFNIIAYGVSDETEQIDYEAFRKKALECKPKMIVSGASAYSRIIDFKKIREICDEVGAYMMVDMAHIAGLVAAGLHPSPIPYADFVTTTTHKTLRGPRGGAIFCKEKYAKDIDKSVFPGMQGGPLMHIIAGKAVCFGEALKDDFKDYAQQIVNNAKVFADELTKYGFRIVSGGTDNHLLLVDLTNKNITGKDAEHLLDSVGITANKNTIPFEKKSPFITSGIRMGTPSVTTRGFKEEEMKKVAYFINYVIEHRDEDLSEIRKQVSELCSGFPIYK

SEQ ID NO: 9811 - DNA, 1290 bp, Agrobacterium tumefaciens str. C58
  CDS (1)..(1290): transl_table=11
atgtcgaacacagatgctttcttctcccgtccgcttgccgaagtcgatccggatattttcggcgcgatcgagaaggaactgggtcgccagcgccacgagatcgaactgatcgcctcggaaaacatcgtttcccgcgctgtgcttgaagcgcagggttcgatcatgaccaacaaatatgcggaaggttatccgggcaagcgttattacggcggctgccagttcgtcgatatcgctgaagagcttgccatcgagcgcgccaagaagctgttcggcgtcaacttcgccaacgttcagccgaactccggttcgcagatgaatcaggccgtgttcctcgcgcttttgcagccgggcgataccttcatgggtctcgatctgaactcggggggccacctgacgcatggttcgccggtcaacatgtccggtaaatggttcaacgtcgtgtcctacggcgtgcgtgaaggcgacaacctgctcgacatggacgaagtggagcgcaaggccaaggaaacccggccgaagctgatccttgccggcggcaccgcctattcgcgcgtctgggactggaagcgcttccgcgagatcgccgatgaagtcggcgcctatctgatggtcgacatggcccacatcgccggtctcgttgccggtggccagcacccgtcgccgttcccgcattgccatgttgccaccaccacgacgcacaagtctctgcgcggcccgcgtggcggcatgatcctcaccaatgacgaggatctggccaagaagttcaactcggccgtattccccggcctgcagggtggcccgctgatgcatgtcatcgccgccaaggccgttgccttcggcgaagcgctgcagccggaattcaaggactatgccgcgcaggtcgtgaagaacgccaaggcgctggccgaaaccctgatcgaaggcggtctcgatgtcgtctccggcggcaccgacaaccacctgatgctggtcgatcttcgcaagaagaacgccaccggcaagcgcgcggaagcagcccttggccgcgcttacatcacctgcaacaagaacggcattcctttcgacccggaaaaacccttcgtcacgtcgggtgtccgtctcggcacgccggccggcacgacgcgcggtttcaaggaagcggaattccgcgaaatcggcaagctgatcgtcgaggttctcgacggcctgaaggttgccaattcggatgaaggtaatgcctccgtcgaggctgccgtgcgcgaaaaggtcgtcggtttgaccgaccgtttcccgatgtatccgtacatgtaa

SEQ ID NO: 9812 - protein, 429 aa, Agrobacterium tumefaciens str. C58
MSNTDAFFSRPLAEVDPDIFGAIEKELGRQRHEIELIASENIVSRAVLEAQGSIMTNKYAEGYPGKRYYGGCQFVDIAEELAIERAKKLFGVNFANVQPNSGSQMNQAVFLALLQPGDTFMGLDLNSGGHLTHGSPVNMSGKWFNVVSYGVREGDNLLDMDEVERKAKETRPKLILAGGTAYSRVWDWKRFREIADEVGAYLMVDMAHIAGLVAGGQHPSPFPHCHVATTTTHKSLRGPRGGMILTNDEDLAKKFNSAVFPGLQGGPLMHVIAAKAVAFGEALQPEFKDYAAQVVKNAKALAETLIEGGLDVVSGGTDNHLMLVDLRKKNATGKRAEAALGRAYITCNKNGIPFDPEKPFVTSGVRLGTPAGTTRGFKEAEFREIGKLIVEVLDGLKVANSDEGNASVEAAVREKVVGLTDRFPMYPYM

SEQ ID NO: 9813 - DNA, 1248 bp, Bacillus subtilis subsp. subtilis str. 168
  CDS (1)..(1248): transl_table=11
atgaaacatttacctgcgcaagacgaacaagtgtttaacgccattaaaaatgagcgtgaacgccaacagactaagatcgaattgattgcttctgagaactttgtaagtgaagcggttatggaagcacaaggatctgttttgacaaataagtacgcagaaggatatccgggcaaacgctactacggcggatgcgagcacgtcgatgtcgttgaagatatcgcccgtgaccgcgcgaaggaaatctttggagcggagcatgtaaacgttcagcctcattcaggcgcacaagcaaacatggcagtgtacttcacgattttggagcaaggcgatactgtacttgggatgaacctctcccacggcggccatttaacacacggaagcccagtcaacttcagcggtgttcaatataactttgttgagtacggcgtagataaagaaactcaatatattgattacgatgacgtgcgtgaaaaagccctcgctcataaaccgaagcttatcgtagcaggagcaagtgcgtatcctcgtacaatcgactttaagaaattccgtgaaattgctgatgaagtcggcgcttacttcatggtggatatggcacatatcgcaggacttgttgcggcaggccttcatccaaacccggttccttacgctgatttcgttacaacaacaacacataaaacacttcgcggtcctcgcggcggtatgatcctttgccgtgaagagtttggcaagaaaattgataaatcgatcttccctggaattcaaggcggccctctgatgcacgttattgccgcaaaagctgtttcattcggtgaagtattgcaggacgatttcaaaacatatgcacaaaacgtcatttcaaacgcgaaacgtctggctgaagccttaacgaaagagggcatccagctcgtttcaggcggaacagacaaccaccttatccttgttgaccttcgttcgctcggactgactggtaaggttgcggagcatgtacttgatgaaattggtattacgtctaacaaaaacgcgattccatatgatcctgaaaaacctttcgtaacaagcggcatccgtcttggtacagctgctgtaaccagccgcggttttgacggagacgcattagaagaagtcggtgctatcattgcgcttgcattgaaaaaccacgaagatgaaggaaaacttgaagaagcaagacagcgtgtagctgctctgactgataaatttcctttatataaagaattagattattaa

SEQ ID NO: 9814 - protein, 415 aa, Bacillus subtilis subsp. subtilis str. 168
MKHLPAQDEQVFNAIKNERERQQTKIELIASENFVSEAVMEAQGSVLTNKYAEGYPGKRYYGGCEHVDVVEDIARDRAKEIFGAEHVNVQPHSGAQANMAVYFTILEQGDTVLGMNLSHGGHLTHGSPVNFSGVQYNFVEYGVDKETQYIDYDDVREKALAHKPKLIVAGASAYPRTIDFKKFREIADEVGAYFMVDMAHIAGLVAAGLHPNPVPYADFVTTTTHKTLRGPRGGMILCREEFGKKIDKSIFPGIQGGPLMHVIAAKAVSFGEVLQDDFKTYAQNVISNAKRLAEALTKEGIQLVSGGTDNHLILVDLRSLGLTGKVAEHVLDEIGITSNKNAIPYDPEKPFVTSGIRLGTAAVTSRGFDGDALEEVGAIIALALKNHEDEGKLEEARQRVAALTDKFPLYKELDY

SEQ ID NO: 9815 - DNA, 1254 bp, Yersinia pestis CO92
  CDS (1)..(1254): transl_table=11
atgttaaagcgtgaaatgaacattgccgattacgatgcagatctgtggcgtgcaatggagcaagaagtcgtgcgtcaggaagaacacatcgaactgattgcgtctgagaactacaccagcccgcgtgttatgcaagcgcagggatctcagttaacgaacaaatatgctgaaggctatccaggcaagcgttattacggtggctgtgaatatgttgatgttgttgaacaattggcaatcgatcgcgctaaagcattatttggtgctgattacgcaaacgttcaacctcattctggttcgcaagctaacgttgctgtttactccgcgctgctgaaacccggtgacaccgtattggggatgaatctggcacacggcggtcacttgacgcatggttcaccagtgaacttctccggcaaactctacaacatcgtcccttatggtattgatgagtcgggtcaaattgattatgaagatctggcacgtcaggcagaaatacataaacccaaaatgattatcggtggcttctccgcctattctggtatcgttgattgggcaaaaatgcgtgaaattgccgacagcattgacgcatggttctttgttgatatggctcatgttgctggtctggttgctgcgggggtttatcctaacccggttccacatgcccacatcgttaccaccacgacgcacaagactctggctggcccacgtggcggtttgattctggcgaaagggggcgatgaagacttgtacaaaaaactgaactcttctgttttccctggtaaccagggtggcccattgatgcatgttatcgcaggtaaagcggtcgcgctgaaagaagcaatggaacctgagtttaaaatttaccaacagcaagtggctaaaaatgcgaaagccatggtggcggtgttcttggagcgcggttacaaagtggtttctggtggtacggataaccacctgttcttgctagatttggtggataaagacatcaccggtaaagacgctgatgcggctttaggccgtgcgaatatcaccgtgaacaaaaacagcgtacctaacgatccgaagagcccgtttgtgacatctggtgtgcgtattggtagcccagcgatcacccgccgtggcttcaaagaagcggaatcccgtgaattggctggctggatgtgtgatgtgttagataacatcaacgatgaagcgaccattgagcgtgtgaaacagaaagttctggctatctgcgctcgtttaccggtttacgcataa

SEQ ID NO: 9816 - protein, 417 aa, Yersinia pestis CO92
MLKREMNIADYDADLWRAMEQEVVRQEEHIELIASENYTSPRVMQAQGSQLTNKYAEGYPGKRYYGGCEYVDVVEQLAIDRAKALFGADYANVQPHSGSQANVAVYSALLKPGDTVLGMNLAHGGHLTHGSPVNFSGKLYNIVPYGIDESGQIDYEDLARQAEIHKPKMIIGGFSAYSGIVDWAKMREIADSIDAWFFVDMAHVAGLVAAGVYPNPVPHAHIVTTTTHKTLAGPRGGLILAKGGDEDLYKKLNSSVFPGNQGGPLMHVIAGKAVALKEAMEPEFKIYQQQVAKNAKAMVAVFLERGYKVVSGGTDNHLFLLDLVDKDITGKDADAALGRANITVNKNSVPNDPKSPFVTSGVRIGSPAITRRGFKEAESRELAGWMCDVLDNINDEATIERVKQKVLAICARLPVYA

SEQ ID NO: 9817 - DNA, 1254 bp, Escherichia coli str. K-12 substr. MG1655
  CDS (1)..(1254): transl_table=11
atgttaaagcgtgaaatgaacattgccgattatgatgccgaactgtggcaggctatggagcaggaaaaagtacgtcaggaagagcacatcgaactgatcgcctccgaaaactacaccagcccgcgcgtaatgcaggcgcagggttctcagctgaccaacaaatatgctgaaggttatccgggcaaacgctactacggcggttgcgagtatgttgatatcgttgaacaactggcgatcgatcgtgcgaaagaactgttcggcgctgactacgctaacgtccagccgcactccggctcccaggctaactttgcggtctacaccgcgctgctggaaccaggtgataccgttctgggtatgaacctggcgcatggcggtcacctgactcacggttctccggttaacttctccggtaaactgtacaacatcgttccttacggtatcgatgctaccggtcatatcgactacgccgatctggaaaaacaagccaaagaacacaagccgaaaatgattatcggtggtttctctgcatattccggcgtggtggactgggcgaaaatgcgtgaaatcgctgacagcatcggtgcttacctgttcgttgatatggcgcacgttgcgggcctggttgctgctggcgtctacccgaacccggttcctcatgctcacgttgttactaccaccactcacaaaaccctggcgggtccgcgcggcggcctgatcctggcgaaaggtggtagcgaagagctgtacaaaaaactgaactctgccgttttccctggtggtcagggcggtccgttgatgcacgtaatcgccggtaaagcggttgctctgaaagaagcgatggagcctgagttcaaaacttaccagcagcaggtcgctaaaaacgctaaagcgatggtagaagtgttcctcgagcgcggctacaaagtggtttccggcggcactgataaccacctgttcctggttgatctggttgataaaaacctgaccggtaaagaagcagacgccgctctgggccgtgctaacatcaccgtcaacaaaaacagcgtaccgaacgatccgaagagcccgtttgtgacctccggtattcgtgtaggtactccggcgattacccgtcgcggctttaaagaagccgaagcgaaagaactggctggctggatgtgtgacgtgctggacagcatcaatgatgaagccgttatcgagcgcatcaaaggtaaagttctcgacatctgcgcacgttacccggtttacgcataa

SEQ ID NO: 9818 - protein, 417 aa, Escherichia coli str. K-12 substr. MG1655
MLKREMNIADYDAELWQAMEQEKVRQEEHIELIASENYTSPRVMQAQGSQLTNKYAEGYPGKRYYGGCEYVDIVEQLAIDRAKELFGADYANVQPHSGSQANFAVYTALLEPGDTVLGMNLAHGGHLTHGSPVNFSGKLYNIVPYGIDATGHIDYADLEKQAKEHKPKMIIGGFSAYSGVVDWAKMREIADSIGAYLFVDMAHVAGLVAAGVYPNPVPHAHVVTTTTHKTLAGPRGGLILAKGGSEELYKKLNSAVFPGGQGGPLMHVIAGKAVALKEAMEPEFKTYQQQVAKNAKAMVEVFLERGYKVVSGGTDNHLFLVDLVDKNLTGKEADAALGRANITVNKNSVPNDPKSPFVTSGIRVGTPAITRRGFKEAEAKELAGWMCDVLDSINDEAVIERIKGKVLDICARYPVYA

SEQ ID NO: 9819 - DNA, 1284 bp, Synechocystis sp. PCC 6803
  CDS (1)..(1284): transl_table=11
gtgaatcaaaccaacctcgactttttagccaccagcgaccccgcccttgcggccatcattgaccgggaattacaacggcaacgcacccacattgaattgattgccagcgaaaatttcacttcagcagcagtaatggcggcccagggttccgtcttaaccaataagtatgccgaaggtctgccgggtaaacgctattacggcggctgtgaatttgtggaccaagcggaaacgctagccatcagtcgagtcaaagagttatttggggctgcccacgccaacgtccaaccccactccggggcccaggccaattttgccgtatttttaaccctgctccagcccggcgacaccattatgggcatggacctttcccacggcggccatttaacccacggttcccctgtcaacgtttctggtaaatggttcgaagtggcccactacggtgtggaaaaggaaacgggtcggttagattacgacaaaatccgccaacaggctctggaagttaaacccaaactgttgatttgtggctactctgcctatccccgacaaatcgagtttgataaattccgggcgatcgccgacgaagtgggagcatacctaatggcagacattgcccacattgccggtttagtggcttcaggacaccatcccagtcccttgccctattgcgatgtcgtcaccaccaccacccataaaaccctgcggggtccccggggtggtttgatcatgaccaataatgaggaattaggcaaaaaattcgacaaatccgtctttcctggcacccagggcggccctttggagcacgtcattaccgctaaagcagtggcctttggggaagcgctgaaaccagaatttaaggtttattctggccaggtaatcgccaacgcccaagccatggccgaccagttacaaaaacggggctttgacctggtatccggcggcaccgataaccatttaatgttggtagacctgcgctcaatcgccatgaccggcaaagtgggcgatcaactgttgggagaaatcaacatcaccgccaacaaaaacacggtgccctttgaccccgaatctccctttgtcaccagtggtttgcgcctgggctcccctgccatgaccaccaggggtatgcaggaagacgaattccgcaccattgccaacatcattgccgatcgcctgttgtccccggaagatgaaggcgtaaaagcggattgtctgcgccgggtcagtgaactttgtgctggtttccccctctatgatcatctccgcattcccgtagcggtgatcgcctga

SEQ ID NO: 9820 - protein, 427 aa, Synechocystis sp. PCC 6803
MNQTNLDFLATSDPALAAIIDRELQRQRTHIELIASENFTSAAVMAAQGSVLTNKYAEGLPGKRYYGGCEFVDQAETLAISRVKELFGAAHANVQPHSGAQANFAVFLTLLQPGDTIMGMDLSHGGHLTHGSPVNVSGKWFEVAHYGVEKETGRLDYDKIRQQALEVKPKLLICGYSAYPRQIEFDKFRAIADEVGAYLMADIAHIAGLVASGHHPSPLPYCDVVTTTTHKTLRGPRGGLIMTNNEELGKKFDKSVFPGTQGGPLEHVITAKAVAFGEALKPEFKVYSGQVIANAQAMADQLQKRGFDLVSGGTDNHLMLVDLRSIAMTGKVGDQLLGEINITANKNTVPFDPESPFVTSGLRLGSPAMTTRGMQEDEFRTIANIIADRLLSPEDEGVKADCLRRVSELCAGFPLYDHLRIPVAVIA

SEQ ID NO: 9821 - DNA, 1254 bp, Salmonella enterica subsp. enterica serovar Typhi str. CT18
  CDS (1)..(1254): transl_table=11
atgttaaagcgtgaaatgaacattgccgattatgatgccgaattgtggcaggctatggagcaggaaaaagtacgtcaggaagagcacatcgaactgatcgcctccgaaaactacaccagcccgcgcgtgatgcaggcgcaggggtctcagctgaccaacaaatacgctgaaggatatccgggcaagcgctactacggcggttgcgaatacgttgatgtcgtagagcagctggctatcgaccgcgcgaaagaactgttcggcgccgactacgctaacgtgcagccgcactccggttctcaggctaacttcgctgtttacaccgcgctgctgcagccgggcgataccgttctgggtatgaacctggcgcagggcggccacctgactcacggctccccggttaacttctccggtaaactgtacaacatcgtaccttacggtatcgatgagtccggtaaaattgactatgacgagatggcgaagctggccaaagagcacaagccgaagatgattatcggtggcttctctgcctactccggtgtggttgactgggcaaaaatgcgtgaaatcgctgacagcatcggcgcatacctgtttgtcgacatggcgcacgtggcgggcctgattgccgcaggcgtttacccgaacccggttccgcacgctcacgttgtcaccaccaccacccacaaaaccctggcgggtccgcgcggcggcctgatcctggcgaaaggcggcgacgaagagctgtacaaaaaactgaactccgccgtcttcccaagcgcgcagggcggcccgctgatgcacgtgatcgcgggtaaagcggtagcgctgaaagaagcgatggagccggagttcaaagtttaccagcagcaggtggcgaaaaacgccaaagcgatggtggaagtgttcctgaaccgcggctacaaagtggtgtctggcggcactgagaaccacctgttcctgctggacctggtggataaaaacctgaccggtaaagaagctgacgccgcgctgggccgtgctaacatcaccgtgaacaaaaacagcgtgccgaacgatccgaagagcccgttcgtgacctccggtatccgtattggttctccggcggttactcgtcgcggcttcaaagaagcggaagtgaaagagctggctggctggatgtgtgacgtgctggacaacatcaatgatgaagccaccattgaacgcgtgaaagcgaaagtgctggatatctgcgcccgcttcccggtttacgcgtaa

SEQ ID NO: 9822 - protein, 417 aa, Salmonella enterica subsp. enterica serovar Typhi str. CT18
MLKREMNIADYDAELWQAMEQEKVRQEEHIELIASENYTSPRVMQAQGSQLTNKYAEGYPGKRYYGGCEYVDVVEQLAIDRAKELFGADYANVQPHSGSQANFAVYTALLQPGDTVLGMNLAQGGHLTHGSPVNFSGKLYNIVPYGIDESGKIDYDEMAKLAKEHKPKMIIGGFSAYSGVVDWAKMREIADSIGAYLFVDMAHVAGLIAAGVYPNPVPHAHVVTTTTHKTLAGPRGGLILAKGGDEELYKKLNSAVFPSAQGGPLMHVIAGKAVALKEAMEPEFKVYQQQVAKNAKAMVEVFLNRGYKVVSGGTENHLFLLDLVDKNLTGKEADAALGRANITVNKNSVPNDPKSPFVTSGIRIGSPAVTRRGFKEAEVKELAGWMCDVLDNINDEATIERVKAKVLDICARFPVYA

SEQ ID NO: 9823 - DNA, 1242 bp, Listeria monocytogenes EGD-e
  CDS (1)..(1242): transl_table=11
atggtctatttacaaaagcaagataaggaagtttttgatgcaattaagttagaacttggtagacaacgcgcgaatatcgaattaatcgcatctgagaattttgttagtgagcaagtaatggaagcaatgggttctgtattaacgaataaatatgcagaaggttacccaggaaaacgctattacggcggatgtgaattcgtggatatcgtggaagatttagcacgcgaccgcgcgaaaaaattatttggagctgaatatgcgaacgttcaaccacactcaggtgctcaagcgaatatggcggtttatcatacagtgcttgaaccaggtgataccgtacttggtatgaacctttcacatggtggacatttaacacatggtagtccagttaatttcagtggtgttttatacaattttgttgaatacggcgttcgtgaagatacaaaagagattgattatgatatcgtccgtgaagctgctttaaaacataaaccaaaaatgattgtagctggcgcaagtgcttatccacgtaaaattgattttgctaaattccgtgaaattgctgatgaagttggcgcatacttaatggtagatatggcgcatatcgccggtcttgttgctgctggtttacaccaaaatccagttccttatgctgattttacaacgacaactacccataaaacgcttcgtggacctcgcggtggaatgattttagccaaagcagaatgggaacaaaaattaaataaatcgattttcccaggaattcaaggtggaccattaatgcacgtaatcgcagcgaaagcagtggcgtttggtgaagcgttacaacctgaattcacaacgtattgcgagcaaattattcgtaattctaagaaattagcagaaactcttcaagcgaatgatgttgctgttttaacaggtggttcggataatcatttattattaattgatttaaaaccacttggcttaacaggaaaagcagctgagaaagtattagatgaagttggtattaccgtgaataaaaataccattccattcgaaacggaaagcccatttgtaacaagtggtattcgtgtaggtgttgctgcagtgacgactcgtggattcgatgaagttgcgattgaaaaagtcggcgtacttatttcggaagtactgcataacttagaaaatgaagaagttctcgcagatgtaaaagcacgcgtggctactttaacaaatgaatatccgctttatccaagtttataa

SEQ ID NO: 9824 - protein, 413 aa, Listeria monocytogenes EGD-e
MVYLQKQDKEVFDAIKLELGRQRANIELIASENFVSEQVMEAMGSVLTNKYAEGYPGKRYYGGCEFVDIVEDLARDRAKKLFGAEYANVQPHSGAQANMAVYHTVLEPGDTVLGMNLSHGGHLTHGSPVNFSGVLYNFVEYGVREDTKEIDYDIVREAALKHKPKMIVAGASAYPRKIDFAKFREIADEVGAYLMVDMAHIAGLVAAGLHQNPVPYADFTTTTTHKTLRGPRGGMILAKAEWEQKLNKSIFPGIQGGPLMHVIAAKAVAFGEALQPEFTTYCEQIIRNSKKLAETLQANDVAVLTGGSDNHLLLIDLKPLGLTGKAAEKVLDEVGITVNKNTIPFETESPFVTSGIRVGVAAVTTRGFDEVAIEKVGVLISEVLHNLENEEVLADVKARVATLTNEYPLYPSL

SEQ ID NO: 9825 - DNA, 1242 bp, Listeria innocua Clip11262
  CDS (1)..(1242): transl_table=11
atggtctatttacaaaagcaagataaggaagtttttgatgcaattaagttagaacttggtagacaacgcgcgaatatcgaattaatcgcatctgagaattttgttagtgagcaagtaatggaagcaatgggttctgtattaacgaataaatatgcagaaggttaccctggaaaacgttactacggcggatgtgaattcgtggatattgtggaagatttagcacgcgaccgggcgaagaaattatttggcgctgaatatgcgaatgttcaaccacactcaggcgctcaagcgaacatggcagtttatcatactgtgcttgaaccaggcgacacagtgcttggtatgaacctttcacatggtggccatttaacacatggtagtccagtgaactttagtggcgttttatacaattttgttgaatacggcgttcgtgaagatacgaaagaaattgactatgaaatcgttcgtgaagcagcattaaaacataaaccaaaaatgattgtagctggagcaagtgcttacccacgtaaaattgattttgctaaattccgtgaaattgctgatgaagttggcgcatacttaatggttgatatggcgcatattgctggtcttgttgcagcaggtttacatcaaaatccagttccttatgctgattttacaactacaaccactcataaaacccttcgtggacctcgtggcggaatgattttagcaaaagctgaatgggaacaaaaattaaataaatcgattttcccgggaattcaaggtggaccattaatgcacgtaatcgcagcgaaagcagtggcatttggtgaagcattacaacctgaattcactgcgtactgtgaacaaatcattcgcaactctaaaaaattagcagaaacacttcaagctaatgatgttgctgttttaacaggcggttcggataatcatttactattaattgatttaaaaccacttggcttaacaggaaaagctgctgaaaaagtattagatgaggttggtattaccgtgaataaaaataccattccatttgaaacagaaagcccatttgtaacgagcggtatccgtgtaggcgtggcggcagttacaacacgtggtttcgatgaagtagctattgaaaaagtgggagtacttatttctgaagtgctgcacaacttagaaaatgaagaagttttagcagatgtgaaagctcgtgtagctaatttaacaaatgaatatccgctttatccaagtttataa

SEQ ID NO: 9826 - protein, 413 aa, Listeria innocua Clip11262
MVYLQKQDKEVFDAIKLELGRQRANIELIASENFVSEQVMEAMGSVLTNKYAEGYPGKRYYGGCEFVDIVEDLARDRAKKLFGAEYANVQPHSGAQANMAVYHTVLEPGDTVLGMNLSHGGHLTHGSPVNFSGVLYNFVEYGVREDTKEIDYEIVREAALKHKPKMIVAGASAYPRKIDFAKFREIADEVGAYLMVDMAHIAGLVAAGLHQNPVPYADFTTTTTHKTLRGPRGGMILAKAEWEQKLNKSIFPGIQGGPLMHVIAAKAVAFGEALQPEFTAYCEQIIRNSKKLAETLQANDVAVLTGGSDNHLLLIDLKPLGLTGKAAEKVLDEVGITVNKNTIPFETESPFVTSGIRVGVAAVTTRGFDEVAIEKVGVLISEVLHNLENEEVLADVKARVANLTNEYPLYPSL

SEQ ID NO: 9827 - DNA, 1284 bp, Nostoc sp. PCC 7120
  CDS (1)..(1284): transl_table=11
atgactagaacaaattcagattttctcactaattctgatccagcgatcgccggattgattaatcaagaactccaacgtcaacgcgaccacttggagttaatcgccagtgaaaacttcacctctgcggctgtcttggcggctcagggttcagtattgacaaataaatacgctgagggactgcctgggaagcgctactacggtggttgtgagtttatcgataaaattgagcaaatagctattgatcgtgctaaacagctatttggtgcagatcatgccaacgtccaaccccattctggcgcacaagccaattttgccgtcttcctgactttactcaaaccaggagacaaaatcatggggatggatttgtctcatggtggacacctcacccacggttccccggtgaatgtttccgggaagtggttccaagtttgtcactacggtgtgagccaacaaacagaacaattagactacgaccaaattcgtgagctggcgctgagggagcgtcctaagcttttgatttgcggttattctgcttatccccggattattgactttgaaaaattccgcagcatcgccgatgaagttggtgcttacttgctggctgatattgcccacattgcaggtttagtcgcaactggactgcatcctaacccactaccttattgtgatgtagtcacaaccaccacccataaaaccctccgtggccccagaggtggtttaattttgacccgtgacgcagaactcggtaaaaaattggataaatccgttttccctggaactcaaggcggccctttagaacacgtcattgctgggaaagcagttgcttttggtgaagccttaaaaccagaatttcaaggctattcagcccaagtaattgataatgcccgtacattagccaatcaactccagactcgcggattgaagctggtatctgatggtacggataaccatttaatgctcgtagatttacggtctgtgaacatgacgggtaaacgagcagaccagctagtgagtgaagtaaatatcaccgctaataaaaatacggttcccttcgatccccaatcaccatttgttaccagtggtttgcgcttgggttcaccagccatgaccacacggggaatgggagaggcggaatttaccgaaattggtaacattatcgccgatcgcctactcaacccagattcagacacagtcgctcaagattgtaaacgtcgggtagccgcattgtgcgatcgcttccccttatatccgcacttagaaattcctgtaccagtcttagcgtag

SEQ ID NO: 9828 - protein, 427 aa, Nostoc sp. PCC 7120
MTRTNSDFLTNSDPAIAGLINQELQRQRDHLELIASENFTSAAVLAAQGSVLTNKYAEGLPGKRYYGGCEFIDKIEQIAIDRAKQLFGADHANVQPHSGAQANFAVFLTLLKPGDKIMGMDLSHGGHLTHGSPVNVSGKWFQVCHYGVSQQTEQLDYDQIRELALRERPKLLICGYSAYPRIIDFEKFRSIADEVGAYLLADIAHIAGLVATGLHPNPLPYCDVVTTTTHKTLRGPRGGLILTRDAELGKKLDKSVFPGTQGGPLEHVIAGKAVAFGEALKPEFQGYSAQVIDNARTLANQLQTRGLKLVSDGTDNHLMLVDLRSVNMTGKRADQLVSEVNITANKNTVPFDPQSPFVTSGLRLGSPAMTTRGMGEAEFTEIGNIIADRLLNPDSDTVAQDCKRRVAALCDRFPLYPHLEIPVPVLA

SEQ ID NO: 9829 - DNA, 1248 bp, Ralstonia solanacearum GMI1000
  CDS (1)..(1248): transl_table=11
atgttcgaacgcaaccgctatacgatcgaccagatcgacccagaagtcttcgccgccatccagcaggaaaaccagcgccaggaagaccacatcgagctgatcgcctccgagaactacacctcgccggccgtgatggccgcccagggctcgcagctgaccaacaagtatgccgagggctatcccggcaagcgctactacggtggctgcgaatacgtggacgtggtcgagcagctcgccatcgaccgcgtgaagcaactgttcggcgccgaggccgccaacgtgcagccgaactccggctcgcaggccaaccagggcgtgttcttcgccatgctcaagccgggcgacaccatcatgggcatgagcctggccgaaggcggccacctgacgcacggcatggcgctcaacatgagcggcaagtggttcaacgtcgtcagctacggcctgaacgcgcaggaagacatcgactacgatgccctcgaagcgctggcacaagagaagaagcccaagctgatcatcgccggcgcctccgcgtttgcgctgcgcatcgacttcgagcgcatcgccaaggtggccaaggccgtcggcgcgtacttcatggttgacatggcccactacgccggcctgatcgccgcgggcgtctacccgaacccggtgccgcacgccgatttcgtgaccaccaccacccacaagagcctgcgcggcccgcgcggcggcgtgatcctgatgaaggccgagcacgagaaggccatcaactcggcgatcttccccggcatccagggcggcccgctgatgcacgtgatcgccggcaaggcggtggcgttcaaggaagcccagtcgcccacgttcaaggcctaccaggaacaggtggtgaaaaacgcccgcgccatggccgaaacgctgatggcccgcggcctgcgcatcgtctccggccgcaccgaaagccacgtgatgctggtcgacctgcgcgcgaagagcattaccggcaaggaagccgagaaggtgctgggcgacgcgcatatcaccgtcaacaaaaacgccatcccgaacgatccggagaagcccttcgtgacctcgggcatccgcctgggctcgccggccatgaccacgcgaggcttcaaggagggtgaggccgtgaaggtagcccacctgatcgccgatgtgcttgataatccgcatgacgaagccaacatcgcggccgtgcgcgccaaggtggccgagctgaccaagcagttcccggtctacgcatga

SEQ ID NO: 9830 - protein, 415 aa, Ralstonia solanacearum GMI1000
MFERNRYTIDQIDPEVFAAIQQENQRQEDHIELIASENYTSPAVMAAQGSQLTNKYAEGYPGKRYYGGCEYVDVVEQLAIDRVKQLFGAEAANVQPNSGSQANQGVFFAMLKPGDTIMGMSLAEGGHLTHGMALNMSGKWFNVVSYGLNAQEDIDYDALEALAQEKKPKLIIAGASAFALRIDFERIAKVAKAVGAYFMVDMAHYAGLIAAGVYPNPVPHADFVTTTTHKSLRGPRGGVILMKAEHEKAINSAIFPGIQGGPLMHVIAGKAVAFKEAQSPTFKAYQEQVVKNARAMAETLMARGLRIVSGRTESHVMLVDLRAKSITGKEAEKVLGDAHITVNKNAIPNDPEKPFVTSGIRLGSPAMTTRGFKEGEAVKVAHLIADVLDNPHDEANIAAVRAKVAELTKQFPVYA

SEQ ID NO: 9831 - DNA, 1233 bp, Clostridium perfringens str. 13
  CDS (1)..(1233): transl_table=11
atgaattttgacaacttagaaagagaagatgagcaaattgcacatcttgttcaaaaggaaaaggaaaggcaagaaaatagtatagagcttatagcttcagaaaactttgttagcaaagctgttatggaagctatgggatcatatttaacaaataaatatgctgagggttatccttcaaaaagatactatggtggatgtcacgtagtagatgaggttgaagatttagcaagagaaagagtaaaaaaattatttggggctgagcatgctaatgtacaaccacattcaggatcacaagctaatatggctgtttatttttcaatattagagccaggtgatactgtattaggaatggatttaagccatggaggacacttaactcatggttcatcagttaacttttcaggtagattatttaatttcgtgtcatatggtgtagataaagaaacagaaacaataaactatgaaactgtaagagaattagctcttaaacataaacctaaattaatagttgcaggagctagtgcatattcaagaattatagattttaaaactttaagagagatagcagatgaggtaggagcatacttaatggttgatatagctcacattgcagggcttgtagctacaggcttacatccatcaccagttccttatgctgattttgttacatcaacaactcataaaactttaagaggaccaagaggaggattaatactttgtaaagaaaaatttgcaaaagtattagataaaaatattttcccaggaatacaaggtggtcctttaatgcatataatagctgcaaaggctgtttgttttaaagaagcattagaaccaagttttaaaacatatatggagcaagttgttaaaaatgcacatgttttagcagaagctttagaagcttatggatttaaattagtttcaaatggaactgataaccatttaatacttgttgatttaactaataaagatataactggtaaagatgcagaaattcttttagatagtataggaataactttaaataaaaatactgtaccaaatgaaacaagaagcccatttgttactagtggtgttagaataggaactcctgctataacaactagaggatttaaagaagaagaaatgaaagaaatagcttctataataaatgatgctattaaagaaaaagatggagatttagaaccattaaaagcaagagttaaagctttatgtgctaagtatcctttatattaa

SEQ ID NO: 9832 - protein, 410 aa, Clostridium perfringens str. 13
MNFDNLEREDEQIAHLVQKEKERQENSIELIASENFVSKAVMEAMGSYLTNKYAEGYPSKRYYGGCHVVDEVEDLARERVKKLFGAEHANVQPHSGSQANMAVYFSILEPGDTVLGMDLSHGGHLTHGSSVNFSGRLFNFVSYGVDKETETINYETVRELALKHKPKLIVAGASAYSRIIDFKTLREIADEVGAYLMVDIAHIAGLVATGLHPSPVPYADFVTSTTHKTLRGPRGGLILCKEKFAKVLDKNIFPGIQGGPLMHIIAAKAVCFKEALEPSFKTYMEQVVKNAHVLAEALEAYGFKLVSNGTDNHLILVDLTNKDITGKDAEILLDSIGITLNKNTVPNETRSPFVTSGVRIGTPAITTRGFKEEEMKEIASIINDAIKEKDGDLEPLKARVKALCAKYPLY

SEQ ID NO: 9833 - DNA, 1797 bp, Arabidopsis thaliana
  CDS (1)..(1797)
atggatttgagtcgttctcaaacaaattttcaattagggtttggttgttcacacgcatcaatgactccaacaccaacaccaagagctccaatcgcagacgattcgattaatctacaagtcgatcaaagtttccgatcattaccaacaactttctctccgattccgttacaattactcgaacaaaaagccgagaagaccaccaccgttgatgagccaaagaaagatggaggaggaggaggagatcaaaaggaagacgagcatttcagaatcttaggtcaccatatgtgtctcaaaaggcaaagagattgtccacttttgttaacgcaatcaaagcatccgaagagaagttccatcggtgattcagatctggaatcgcgacgtgctgctgtacgagcttggggtgatcaaccgattcatttggcggatcctgatattcatgagcttatggagaaagagaagcaacgacaagtaagaggaattgaattgattgcttctgagaatttcgtgtgtagagctgtaatggaagctttaggtagtcatttaacgaataaatactctgaaggtatgcctggagctagatactatactgggaatcaatatattgatcagattgagaatctctgtattgagcgtgctcttactgcgtttggtcttgaatctgataaatggggtgttaatgttcagccttattcttgtacttctgctaacttcgcggtgtataccggacttttattgcccggtgaacggattatggggcttgattcgccttctggtggtcatatgagtcatggttattgtactcctggtgggaagaagatttcggctgcttccatcttctttgagagttttccttataaagtgaatcctcaaactgggtatattgattatgataagcttgaagataaggcgcttgattaccgtcctaagattcttatttgtggtgggagttcttatcctagggattgggattttgcaagggttagacagattgcagataagtgtggagctgttttgatgtgtgatatggctcatattagcggtcttgttgcaactaaggaatgttcaaatccatttgatcactgtgacatagtaacctccactactcacaaaggtctacgtggtcctagaggaggtatcatcttctacaggagaggcccaaagataagaaagcagggccatcactctagccattgtgacacttccacgcattacgatctagaggaaaagatcaactttgctgtttttccatctctacaaggaggtccacacaacaaccatatcgctgctcttgccattgcattgaaacaagtggccactccagagtacaaagcttacatacaacagatgaagaaaaacgcccaagctttagcagcagctcttcttagaagaaaatgcagactggttactggtggtacagacaaccatttgttgctgtgggatctcactcctatgggcttaacagggaaagtctacgagaaagtgtgtgagatgtgccatatcactttaaacaagacggctatattcggggacaatggtacaatatctcctggaggtgtaagaatagggacacccgcaatgacaacccgaggctgtatagagtctgatttcgagacaatggcggattttctgataaaggcggctcagataacaagtgcgttgcagagagagcatggaaagtcacacaaggagtttgtgaaaagtttatgcaccaacaaagacatagctgagcttagaaaccgagtcgaagcatttgctttgcagtatgagatgcctgcttctcttattcgaattgaatga

SEQ ID NO: 9834 - protein, 598 aa, Arabidopsis thaliana
MDLSRSQTNFQLGFGCSHASMTPTPTPRAPIADDSINLQVDQSFRSLPTTFSPIPLQLLEQKAEKTTTVDEPKKDGGGGGDQKEDEHFRILGHHMCLKRQRDCPLLLTQSKHPKRSSIGDSDLESRRAAVRAWGDQPIHLADPDIHELMEKEKQRQVRGIELIASENFVCRAVMEALGSHLTNKYSEGMPGARYYTGNQYIDQIENLCIERALTAFGLESDKWGVNVQPYSCTSANFAVYTGLLLPGERIMGLDSPSGGHMSHGYCTPGGKKISAASIFFESFPYKVNPQTGYIDYDKLEDKALDYRPKILICGGSSYPRDWDFARVRQIADKCGAVLMCDMAHISGLVATKECSNPFDHCDIVTSTTHKGLRGPRGGIIFYRRGPKIRKQGHHSSHCDTSTHYDLEEKINFAVFPSLQGGPHNNHIAALAIALKQVATPEYKAYIQQMKKNAQALAAALLRRKCRLVTGGTDNHLLLWDLTPMGLTGKVYEKVCEMCHITLNKTAIFGDNGTISPGGVRIGTPAMTTRGCIESDFETMADFLIKAAQITSALQREHGKSHKEFVKSLCTNKDIAELRNRVEAFALQYEMPASLIRIE

SEQ ID NO: 9835 - DNA, 1590 bp, Arabidopsis thaliana
  CDS (1)..(1590)
atgcaagcttgttgtggtggtaattcgatggcttctcttcagcaacctggacgggttcaaggatctgtctttcccccaattatgcctccagtgaccaaattttctcagcagttgaagttcaatatttcaaaacctttccgttcttcatttctgaaaagaaacctggtctctgaaatgagagcatcttcagtctcgctacctaatgtcgagataagcagcaaagaaatcccttttgaggactatggtcttggtgaagttgatccagaggtccgaaccatcatcacaaaggagaaagatagacaattcaggagcttggagcttattgcatctgagaatttcacgtctcgagcagttatggaggcggttggctcatgccttaccaacaagtattctgagggactgcctggtaaaagatattatggtggcaatgagtacattgatcagttggagacgctttgccagaaccgggctttggcagccttccgcttagattctacgaaatggggggttaatgttcagccgttatctggttcacctgcaaactttgctgtctacactgcgatacttagccctcatgatcggatcatgggtttggatttacctcacggtggtcatctgtcgcatgggttcatgaccgctaaaaggcgtgtatctggaacttcaatatactttgagtccatgccttatcgacttgatgaatcaacaggcattgttgactacgatatgctcgagaaaactgctacacttttcagaccaaagcttattatcgcaggagctagtgcatacagccgagattttgactatcctcgcatgaggaagatcgcagactcagttggtgcttttctgatgatggatatggctcatatcagtgggcttgtggctgcttctgtggtagctgacccttttgagtattgtgatattgttacaacaacaactcacaagtctttgagaggtccgagaggtggcatgatcttcttcaggaaggatccaattaatggggttgatcttgaatctgccgtgaacaatgctgtcttccctggtttgcagggtggccctcataaccacacaattggaggattagcagtctgcttgaaacacgcacaatcaccggaattcaaggcgtaccagaaaagagttgtgtctaactgtagagctctagctaaccgattggttgaactcgggtttaagctagtttctggtggcagcgataaccacttggttctcgtcgatcttagacccatgggtatggatggtgcgcgggttgagaaaatcttagacatggcatctattactctcaacaagaactctgtccctggggacaaaagtgcgttggtaccagggggaataaggataggatcccccgcgatgacgacaagaggactgtcagagaaagactttgtagtagtggctgacttcatcaaggaaggtgtggagataacaatggaagccaagaaagccgcgccgggttcaaagcttcaagatttcaacaagttcgtgacatctcctgagtttccattgaaagagagagtgaagagtctaaaggagagagtggaaaccttcacatctcgttttcccattcctggcgtttaa

SEQ ID NO: 9836 - protein, 529 aa, Arabidopsis thaliana
MQACCGGNSMASLQQPGRVQGSVFPPIMPPVTKFSQQLKFNISKPFRSSFLKRNLVSEMRASSVSLPNVEISSKEIPFEDYGLGEVDPEVRTIITKEKDRQFRSLELIASENFTSRAVMEAVGSCLTNKYSEGLPGKRYYGGNEYIDQLETLCQNRALAAFRLDSTKWGVNVQPLSGSPANFAVYTAILSPHDRIMGLDLPHGGHLSHGFMTAKRRVSGTSIYFESMPYRLDESTGIVDYDMLEKTATLFRPKLIIAGASAYSRDFDYPRMRKIADSVGAFLMMDMAHISGLVAASVVADPFEYCDIVTTTTHKSLRGPRGGMIFFRKDPINGVDLESAVNNAVFPGLQGGPHNHTIGGLAVCLKHAQSPEFKAYQKRVVSNCRALANRLVELGFKLVSGGSDNHLVLVDLRPMGMDGARVEKILDMASITLNKNSVPGDKSALVPGGIRIGSPAMTTRGLSEKDFVVVADFIKEGVEITMEAKKAAPGSKLQDFNKFVTSPEFPLKERVKSLKERVETFTSRFPIPGV

SEQ ID NO: 9837 - DNA, 1614 bp, Drosophila melanogaster
  CDS (1)..(1614)
atgcagcgggcgcgctctacactgacacaaaagcttcggttttgccttagtcgggacctgaacaccaaagttggcaacccggttaacttcgagactggaaagcttagcggagctttaactcgcatcgccgccaaaaaacaaccatcaccaacgccattcttaccggcgatcagacgatattcggactccaagcagagcactttgaagaatatggccgatcagaaactgctgcaaaccccgctggcacagggcgatccggagctggccgagctgatcaagaaggagaaggagcgccagcgcgaaggactcgagatgatcgccagtgagaacttcacctcggtggcggttctcgagagcctgagctcctgcctgaccaacaagtactccgagggatatcccggcaagaggtactacggtggcaacgagtacatcgaccgcatagagctgctcgcccagcaacgcggacgcgagctgttcaacctggacgatgagaagtggggcgttaatgtgcagccttattccggatccccggccaatctggctgtctacacgggcgtctgccggccccacgatcgcatcatgggcctggatctgcccgatggcggtcacttgacgcacggtttcttcacgcccaccaagaagatatcggccacatcgatcttcttcgagagcatgccgtacaaagtgaacccggagacgggcatcatcgattacgataagttggcggaggcggcgaagaatttccggccgcagatcatcattgctggcatatcgtgctactcccgtctgctggactatgcgcgtttccgacagatttgcgatgatgtgggcgcctacctgatggccgacatggcccatgtggcgggcattgtggccgcgggattgataccatcgccgttcgaatgggccgacattgtgaccaccaccacgcacaagacactgcgaggtccgcgcgccggcgtgatcttcttccgcaagggcgtgcgcagcaccaaggccaatggagacaaggtactctacgatctggaggagcgcatcaaccaggcggtgtttccatcactccagggtggtccgcacaacaacgccgtggctggcattgccaccgccttcaagcaggccaagagtcccgaattcaaggcctaccagacgcaggtgctcaagaatgccaaggccctgtgcgatggcctcatttcgcgaggctatcaggtggccaccggcggcaccgacgtccatttggtgctggtcgatgtgcgtaaggctggcctgaccggcgccaaggccgagtacatcctcgaggaggtgggcatcgcgtgcaacaagaacactgtgcccggcgacaagtccgccatgaatccctccggcatccggctgggcacaccggccctgaccactcgcggccttgccgagcaggacatcgagcaggtggtggccttcatcgatgctgccctaaaggttggcgtccaggcagccaagctggccggcagtcccaagataaccgattaccacaagacgctggccgagaatgtggagctcaaggcccaggtggacgagatccgcaagaatgtggcccagttcagcaggaaattcccgctgcccggcctggagaccctgtag

SEQ ID NO: 9838 - protein, 537 aa, Drosophila melanogaster
MQRARSTLTQKLRFCLSRDLNTKVGNPVNFETGKLSGALTRIAAKKQPSPTPFLPAIRRYSDSKQSTLKNMADQKLLQTPLAQGDPELAELIKKEKERQREGLEMIASENFTSVAVLESLSSCLTNKYSEGYPGKRYYGGNEYIDRIELLAQQRGRELFNLDDEKWGVNVQPYSGSPANLAVYTGVCRPHDRIMGLDLPDGGHLTHGFFTPTKKISATSIFFESMPYKVNPETGIIDYDKLAEAAKNFRPQIIIAGISCYSRLLDYARFRQICDDVGAYLMADMAHVAGIVAAGLIPSPFEWADIVTTTTHKTLRGPRAGVIFFRKGVRSTKANGDKVLYDLEERINQAVFPSLQGGPHNNAVAGIATAFKQAKSPEFKAYQTQVLKNAKALCDGLISRGYQVATGGTDVHLVLVDVRKAGLTGAKAEYILEEVGIACNKNTVPGDKSAMNPSGIRLGTPALTTRGLAEQDIEQVVAFIDAALKVGVQAAKLAGSPKITDYHKTLAENVELKAQVDEIRKNVAQFSRKFPLPGLETL

SEQ ID NO: 9839 - DNA, 1419 bp, Schizosaccharomyces pombe
  CDS (1)..(1419)
atgaagtgttctaataaagttctaacgataattaagttactcaaagcaccattggcagaatgtgatccgacagtgtataagattttggaatctgagaaaagccgtcagaaagagtcgatagctttaattgctagcgaaaactttacttcaagagctgtgatggatgcactcggaagtattatgcaaaacaaatatagtgaaggctatcctggtgcaagatattatggtggtaatgaatttatagatcaagctgaaagactatgtcaaacgagagctttagaagcttttcatttggatggggaaaaatggggagtaaatgtacaaccccattctgggtctccggccaacttacaggcttatcaagcagtaatgaagccacacgatcgcctaatgggtttagatttaccccatggcggtcatttatctcatggtttctctactccccagaaagctatttcagctgtctcgacttatttttccaccatgccatataacgtaaataaggaaactggtattattgactatgatagtttggaaaaggctgcgatacaatttcgtcctaaagttatagttgcaggcgctagtgcttatgcacgactcgttgattacaagcgtatgcgtaaaattacggaaatgtgcaatgcctatttgctttgtgatatggctcacatatccggtttagtagctgccggtgtaattccttctccgtttgaatacgccgatattgttactacgacgactcataagtctttacgtggaccgagaggagctatgatattttatcgaaaaggtactcgttctcacgataaacgtggtaatccaattttatatgaattagaggataaaatcaatttctcagtttttcctggacatcaaggcggcccccataatcatacaattactgcgttagctgtcgcccttggacaagcaaaaactcctgaattctatcaataccaaaaggacgttctaagtaacgccaaggcaatggccaatgcatttattactcgtggctataagttagtttcaggtggcacggatactcacttggttcttgttgatttgaccgacaaaggtgtagatggtgcccgtgtcgaacgtattttagagcttgtaaatatttctgccaacaagaatactgtgcccggagataagtctgctttaattccacgtggattacgtctgggaactccagcttgcactactcgcggttttgatgagaaggattttgagagagtggtagagctaattgatgaagttgtatctttgaccaagaaaataaatgaagctgctttgaaggaaggaaaatcgaagtttagagacttcaaagcatatgtgggtgatggttctaaattctctgaaatcgccaaactgaagaaagaagttataacttgggctggaaaatttgatttccccgtttaa

SEQ ID NO: 9840 - protein, 472 aa, Schizosaccharomyces pombe
MKCSNKVLTIIKLLKAPLAECDPTVYKILESEKSRQKESIALIASENFTSRAVMDALGSIMQNKYSEGYPGARYYGGNEFIDQAERLCQTRALEAFHLDGEKWGVNVQPHSGSPANLQAYQAVMKPHDRLMGLDLPHGGHLSHGFSTPQKAISAVSTYFSTMPYNVNKETGIIDYDSLEKAAIQFRPKVIVAGASAYARLVDYKRMRKITEMCNAYLLCDMAHISGLVAAGVIPSPFEYADIVTTTTHKSLRGPRGAMIFYRKGTRSHDKRGNPILYELEDKINFSVFPGHQGGPHNHTITALAVALGQAKTPEFYQYQKDVLSNAKAMANAFITRGYKLVSGGTDTHLVLVDLTDKGVDGARVERILELVNISANKNTVPGDKSALIPRGLRLGTPACTTRGFDEKDFERVVELIDEVVSLTKKINEAALKEGKSKFRDFKAYVGDGSKFSEIAKLKKEVITWAGKFDFPV

SEQ ID NO: 9841 - DNA, 1239 bp, Methanosarcina acetivorans C2A
  CDS (1)..(1239): transl_table=11
atgtcttacattgaaaaaatcgatccagatatgttcgaggctatccaaaaggaagctgatcgtcaggaacacaaacttaacctgattgcgtccgaaaactatgcgagcagggctgtaatggaagctcagggctcaatcatgaccaacaagtatgccgaaggatattccggtaagcgctattacggcggttgtgatttcgtggacattgccgaaaatctcgcaattgccagggcaaaggaaatcttcggggcaaaatacgtaaatgtccagccccactcaggttcaggtgccaacatggctgtctacttctccgtactgcagcctggggacacaatcatgtccatggatctctcccacggcgggcacctttctcacggcagccctgtaagtttttccggaaaactctataacatcgtgccttacggagtcagcaaagagaccgaagccctggactatgacgagcttatgaaaatggcaaaagaatgcaaaccgaaaatgatcgtctgcggagcttcagcctatccccgtgtaatcgatttcaagaagttcagggaaattgccgatgaagtgggagcttatctccttgcagacattgcccacattgcaggtcttgtcgtttcaggcgtacacccaagccctgtgccttatgcggattttgtcaccaccacgacccacaagaccctccgggggccgaggggcggaatgattatctcaaagaccgaggaacttgcaatgggagtaaacaaggccgttttcccgggcattcagggtgggcccctcatgcatgtcatagctgcaaaggccgtcgcctttaaggaagccatggatgaaaagttcaggcaggaccaggctcagaccgtaaagaatgcaaaagttctctgcgcctgtctgaaggagaagggttttgatattgtttccggcggtactgacaaccatctgatgcttgtaaacctcaataatatgaacattacaggcaaggacgcggaagctgcaatgagcaaagccgggattatcgccaacaaaaacacggtgcctttcgagactcgcagccccttcataaccagcggagtaaggctcgggactcctgcctgtaccacaaggggcatgaaagaaaaagaaatggaactgattgccgactatatcgagactgcaatcaagaatgcaggaaacgatgctctgctgtcggaagtaagcgctaaggtaagggacctctgctcaaggttccctgtttacagctaa

SEQ ID NO: 9842 - protein, 412 aa, Methanosarcina acetivorans C2A
MSYIEKIDPDMFEAIQKEADRQEHKLNLIASENYASRAVMEAQGSIMTNKYAEGYSGKRYYGGCDFVDIAENLAIARAKEIFGAKYVNVQPHSGSGANMAVYFSVLQPGDTIMSMDLSHGGHLSHGSPVSFSGKLYNIVPYGVSKETEALDYDELMKMAKECKPKMIVCGASAYPRVIDFKKFREIADEVGAYLLADIAHIAGLVVSGVHPSPVPYADFVTTTTHKTLRGPRGGMIISKTEELAMGVNKAVFPGIQGGPLMHVIAAKAVAFKEAMDEKFRQDQAQTVKNAKVLCACLKEKGFDIVSGGTDNHLMLVNLNNMNITGKDAEAAMSKAGIIANKNTVPFETRSPFITSGVRLGTPACTTRGMKEKEMELIADYIETAIKNAGNDALLSEVSAKVRDLCSRFPVYS

SEQ ID NO: 9843 - DNA, 1242 bp, Thermoanaerobacter tengcongensis MB4
  CDS (1)..(1242): transl_table=11
atggatattgaaataataagaaaaacagacccagaaatcgcagaagtcatattaaaagaactcaacagacagagaaacaaaatagagcttatagcctctgaaaactttgtgagcagggccgtaatggaagcaatgggtacccctctcacaaataaatacgcagaagggtatcccggaaggcgttattacggtggctgtgaatatgtagatatggcagaggaacttgcaagggaaaggcttaaaaagcttttcggagcggaacacgcaaatgtgcagcctcactcgggagctcaggcaaatatggcagcttattttgcacttctaaaacctggagatactgtactaggaatggatttagctcacggcggacatttaacccatggaagcaaagtcaatttttctgggcaaatatataactttgtatcctatggcgtaagagaagatacaggatacatagactatgaccaagtagaagacctagcaaaaaagcataaaccaaaactaattgtagctggcgctagtgcttatccaagaataattgactttaagaaatttagagaaattgcagacaaggtaggagcatatctgatggtagacatggctcacattgccgggcttgtcgcagcaggtttacacccaaatcctgttccttatgcagacgtagtgacaactactactcataagactttaagaggacctagaggaggagctatactctgtaaacaagaacacgcaaaagccatcgacaaagcccttttccctggaacacaaggtggacccttaatgcatattatagcagcaaaagctgtatgttttaaagaagccctttcagatgagtttaaagaatatcaaaaaaggattgtagaaaacgcaaaagctttagcaaatgcattaatggaaagaggaataaatttggtatccggcggtactgacaaccacttaatgctattagatttgcgaaacacaggaataacaggaaaggaattggaaactagattagatgaagtaaacataacttgcaataaaaacgctataccttttgatccattaggaccaaatgtaacctctggcgtaagattaggtacacctgcagttaccaccagaggaatgaaaccggaagacatggtagaaatagcagatataatagctaatatgataaaagatgaaaattacaaagaaaaagcgaaagaaagggtagcaaaactacttgaaaaataccctctctacccagacctcttataa

SEQ ID NO: 9844 - protein, 413 aa, Thermoanaerobacter tengcongensis MB4
MDIEIIRKTDPEIAEVILKELNRQRNKIELIASENFVSRAVMEAMGTPLTNKYAEGYPGRRYYGGCEYVDMAEELARERLKKLFGAEHANVQPHSGAQANMAAYFALLKPGDTVLGMDLAHGGHLTHGSKVNFSGQIYNFVSYGVREDTGYIDYDQVEDLAKKHKPKLIVAGASAYPRIIDFKKFREIADKVGAYLMVDMAHIAGLVAAGLHPNPVPYADVVTTTTHKTLRGPRGGAILCKQEHAKAIDKALFPGTQGGPLMHIIAAKAVCFKEALSDEFKEYQKRIVENAKALANALMERGINLVSGGTDNHLMLLDLRNTGITGKELETRLDEVNITCNKNAIPFDPLGPNVTSGVRLGTPAVTTRGMKPEDMVEIADIIANMIKDENYKEKAKERVAKLLEKYPLYPDLL

SEQ ID NO: 9845 - DNA, 1263 bp, Streptomyces coelicolor A3(2)
  CDS (1)..(1263): transl_table=11
atgtcgcttctgaacacacccctgcacgagctggacccggacgtcgccgccgccgtcgacgccgagctggaccgccagcagtccaccctcgagatgatcgcgtcggagaacttcgccccggtcgcggtcatggaggcccagggctcggtcctcaccaacaagtacgccgagggctaccccggccgccgctactacggcggctgcgagcacgtcgacgtggtcgagcagatcgccatcgaccgggtcaaggcgctcttcggcgccgagcacgccaacgtgcagccgcactcgggcgcccaggccaacgcggccgcgatgttcgcgctgctcaagcccggcgacacgatcatgggtctgaacctcgcgcacggcgggcacctgacccacggcatgaagatcaacttctccggcaagctctacaacgtggtcccctaccacgtcggcgacgacggccaggtcgacatggccgaggtggagcgcctggccaaggagaccaagccgaagctgatcgtggcgggctggtcggcctacccgcgtcagctggacttcgccgcgttccgcaaggtcgcggacgaggtcggcgcgtacctgatggtcgacatggcgcacttcgccggtctggtcgcggcgggcctgcacccgaacccggtcccgcacgcccacgtcgtcaccacgaccacccacaagacgctgggcggtccgcgcggcggtgtgatcctctccacggccgagctggccaagaagatcaactccgccgtcttccccggtcagcagggtggcccgctggagcacgtggtggccgccaaggccgtcgccttcaaggtcgccgcgagcgaggacttcaaggagcgccagggccgtacgctggagggtgcccgcatcctggccgagcgcctggtgcgggacgacgcgaaggccgcgggcgtctccgtcctgaccggcggcacggacgtccacctggtcctggtggacctgcgcgactccgagctggacggacagcaggccgaggaccgcctccacgaggtcggcatcacggtcaaccgcaacgccgtcccgaacgacccgcgcccgccgatggtgacctccggtctgcgcatcggtacgccggccctggcgacccgcggcttcaccgccgaggacttcgccgaggtcgcggacgtgatcgccgaggcgctgaagccgtcctacgacgcggaggccctcaaggcccgggtgaagaccctggccgacaagcacccgctgtacccgggtctgaacaagtag

SEQ ID NO: 9846 - protein, 420 aa, Streptomyces coelicolor A3(2)
MSLLNTPLHELDPDVAAAVDAELDRQQSTLEMIASENFAPVAVMEAQGSVLTNKYAEGYPGRRYYGGCEHVDVVEQIAIDRVKALFGAEHANVQPHSGAQANAAAMFALLKPGDTIMGLNLAHGGHLTHGMKINFSGKLYNVVPYHVGDDGQVDMAEVERLAKETKPKLIVAGWSAYPRQLDFAAFRKVADEVGAYLMVDMAHFAGLVAAGLHPNPVPHAHVVTTTTHKTLGGPRGGVILSTAELAKKINSAVFPGQQGGPLEHVVAAKAVAFKVAASEDFKERQGRTLEGARILAERLVRDDAKAAGVSVLTGGTDVHLVLVDLRDSELDGQQAEDRLHEVGITVNRNAVPNDPRPPMVTSGLRIGTPALATRGFTAEDFAEVADVIAEALKPSYDAEALKARVKTLADKHPLYPGLNK

SEQ ID NO: 9847 - DNA, 1260 bp, Methanosarcina mazei Go1
  CDS (1)..(1260): transl_table=11
atgagttataaggtgacagtgatgtcttatattgaaaaaattgacccggaattgttcgaggctatcaaaaatgaagccgatcgtcaggaacacaagctgaacctgatcgcatcagaaaactatgcgagcagggctgttatggaagcccagggctctattatgaccaacaagtatgccgaaggatattccggtaaacgctattacggaggctgcgatttcgttgacgttgccgaaaatctcgccattgcaagggcaaaggaacttttcggggcaaagtatgtaaacgtccagcctcactcaggttcaggtgccaacatggctgtttatttctctgtgctgcagccgggggatactatcctgtccatggacctctctcacggcggacacctttctcacggcagccctgtaagtttctcaggaaaactctataacatcgtgccctatggggtcagcaaagagaccgaagccctggattacgatgagctccttaaactggcaaaagaatgcaagcccaggatgatagtatgcggagcttcagcctatccccgtgtgattgattttaaaaggttcagggaaattgctgatgaggtcggagcttacctccttgcagatattgcacacatcgcaggacttgtagttgcaggcgtacacccgagccctgttccttatgcggattttgttaccacaaccacccacaagaccctgcgcggtcccaggggcggaatgattatctcgaagactgaagagcttgcaataggcgtgaacaaagcggttttcccgggtatccagggcggccccctcatgcatatcatagctgcaaaagctgttgccttcaaagaagccatgagcgaagagttcaggcaggaccaggatcagaccgtaaagaacgcaaaggtcctgtgttcatgtctgaagcagaaaggttttgatattgtttcaggcggcaccgacaaccaccttatgcttgtaaatctcaataatatgaatattacaggaaaggacgctgaagctgcactgagcaaagccgggatcatcgccaacaaaaacacagttcctttcgagacccgcagcccattcgtaaccagcggggtaaggctcgggaccccttcctgcaccacaaggggcatgaaagaaaaggaaatggaactggttgcagactacatcgaggctgcaataaagaattcggaaaacgatgctcttctgtcggaaatcaatattaaggtaagggatctctgtttaaagttccctgtttacgaataa

SEQ ID NO: 9848 - protein, 419 aa, Methanosarcina mazei Go1
MSYKVTVMSYIEKIDPELFEAIKNEADRQEHKLNLIASENYASRAVMEAQGSIMTNKYAEGYSGKRYYGGCDFVDVAENLAIARAKELFGAKYVNVQPHSGSGANMAVYFSVLQPGDTILSMDLSHGGHLSHGSPVSFSGKLYNIVPYGVSKETEALDYDELLKLAKECKPRMIVCGASAYPRVIDFKRFREIADEVGAYLLADIAHIAGLVVAGVHPSPVPYADFVTTTTHKTLRGPRGGMIISKTEELAIGVNKAVFPGIQGGPLMHIIAAKAVAFKEAMSEEFRQDQDQTVKNAKVLCSCLKQKGFDIVSGGTDNHLMLVNLNNMNITGKDAEAALSKAGIIANKNTVPFETRSPFVTSGVRLGTPSCTTRGMKEKEMELVADYIEAAIKNSENDALLSEINIKVRDLCLKFPVYE

SEQ ID NO: 9849 - DNA, 1254 bp, Xanthomonas campestris pv. campestris str. ATCC 33913
  CDS (1)..(1254): transl_table=11
atgttctcgcgcgacgtccgactggaaacctacgaccccgaactggccaaggccattgccgctgaagccggccgccaggaggatcacgtcgagctgatcgccagcgagaactactgcagcccgctggtgatggaagcccagggcagccagctgaccaacaagtacgccgaaggctacccgggcaagcgctactacggcggttgcgagttcgtcgacattgccgagcaattggccattgaccgcatcaagcaggtgttcggtgcggactacgccaacgtgcagccgcacagtggctcgcaggccaaccaggcggtgtacctcgcgctgctgcagccgggcgacaccatcctgggcatgagcctggcccatggcggccacctcacccacggcgccaaggtcaatgcctcgggcaagctgttcaacgccgtgcagtacggcgtgaacgagcagggcctgatcgattacgacgaggtgcagcgcctggccaccgagcacaagccgaagatggtcattgccggcttctcggcgtattcgcagaagatcgactgggcgcgcttccgcgccattgccgacagcgtcggtgcgtatctgttcgtggacatggcgcacgtggccggcctggtggccgccggtgtgtaccccagcccgatggaccatgcgcacgtggtcacctcgaccacgcacaagaccctgcgtggcccgcgtggcggcatcatcctggccaagggcgcgggcgaggacctggtcaagaagctgcagtcgatcgtgttccccggcatccagggtggcccgctgatgcacgtgatcgcggccaaggcggttgcgttcaaggaagcactggagccggagttcaagacctaccagcagcaggtggtcaagaacgcgcaggcgatggcgaacacgctgatcgcgcgcggctacaagatcgtctccggtggcaccgagaaccacctgatgctggtggacatgatcggccgcgatgtctcgggcaaggacgcagaagccgcgctcggcaaagcgcacatcaccgtcaacaagaactcggtgcccaacgacccgcgctctccctttgttacctcgggcctgcgcctgggcaccccggccattaccacccgcggttaccaggaacaggactgcgtggacctggccaactggatcgccgacgtgctggacgccccggccgacgacgccgtgctggccaaggtgcgcgatgcagtgaccgcgcagtgcaagaaatatcctgtgtatggctga

SEQ ID NO: 9850 - protein, 417 aa, Xanthomonas campestris pv. campestris str. ATCC 33913
MFSRDVRLETYDPELAKAIAAEAGRQEDHVELIASENYCSPLVMEAQGSQLTNKYAEGYPGKRYYGGCEFVDIAEQLAIDRIKQVFGADYANVQPHSGSQANQAVYLALLQPGDTILGMSLAHGGHLTHGAKVNASGKLFNAVQYGVNEQGLIDYDEVQRLATEHKPKMVIAGFSAYSQKIDWARFRAIADSVGAYLFVDMAHVAGLVAAGVYPSPMDHAHVVTSTTHKTLRGPRGGIILAKGAGEDLVKKLQSIVFPGIQGGPLMHVIAAKAVAFKEALEPEFKTYQQQVVKNAQAMANTLIARGYKIVSGGTENHLMLVDMIGRDVSGKDAEAALGKAHITVNKNSVPNDPRSPFVTSGLRLGTPAITTRGYQEQDCVDLANWIADVLDAPADDAVLAKVRDAVTAQCKKYPVYG

SEQ ID NO: 9851 - DNA, 1323 bp, Chlorobium tepidum TLS
  CDS (1)..(1323): transl_table=11
atggacaacgatattctgaaacggctcgaccccgaggtcttcgaggcgattgccaatgaaacaaaacgccaaaccgaaacgctcgaactgatcgcttcggagaacttcaccagcaaggcggtcatggaagcttgcggctcggtgatgaccaacaagtacgccgagggctaccccggcaagcgctactacggcggctgcgaatttgttgatgtggccgagaacctcgcccgcgaccgcgccaagaagcttttcggctgtgagtacgtcaacgtgcagccgcactccggttccagcgccaacatggcggtgcttttcgccgtgctcaagccgggcgacgccatcatgggcctcgacctctcccacggcggccacctgactcacggcagcaaggtgaacttctccggccagttctttgatgcccactcttacggcgttgacaaagagactggcatcatcgacatgaacaaggtcgaagagatggccaggcgagtcaagccgaagctcatcatcaccggcgcgagtgcctactcgcagggctttgacttcaaggcgttccgcgaagtcgccgacaaagtcggtgcgctgctcatggccgacatcgcccacccggcgggcctcgttgctgcgggcctttctgccaacccgatgccgcattgccacttcgtgaccaccaccacgcacaagaccctgcgcggcccacgcggcggcatgatcatgatgggcaaggatttcgagaatccgctcggcctgactatcaacaccaagaacggctcgcgcgtcaagatgatgtccgaggtgatcgacgccgaggtgatgcccggcatccagggcggcccgctcatgcacatcatcgccggcaaggcggttgccttcggcgaagcgctccagcccgagtttaaagcctatgcgcagcagatcaaggacaacgccgctgcaatggccgcgaagttcctcgcggcgggctaccacatcgtcagcggtggtacgaaaaaccacctcatgctgctcgacctgcgcaacaagaacgtcaacggcaaggtagccgaaaacctcctgcacgaagccggaatcacggttaacaaaaacatggtgcctttcgacgacaaatcgccgttcgtcaccagcggcatccgcatcggcaccccggcgatgaccactcgtgggatgaaggttgccgaagctgaaaagatcgttgaattcatcgatcgcgtcatcagcgctgccaacgacgccaacgtcgccgatgtctgcaaggccgtcagggctgaagttcgcgagctgtgccttggcttcccgctcaacaactacggttctctcgtctaa

SEQ ID NO: 9852 - protein, 440 aa, Chlorobium tepidum TLS
MDNDILKRLDPEVFEAIANETKRQTETLELIASENFTSKAVMEACGSVMTNKYAEGYPGKRYYGGCEFVDVAENLARDRAKKLFGCEYVNVQPHSGSSANMAVLFAVLKPGDAIMGLDLSHGGHLTHGSKVNFSGQFFDAHSYGVDKETGIIDMNKVEEMARRVKPKLIITGASAYSQGFDFKAFREVADKVGALLMADIAHPAGLVAAGLSANPMPHCHFVTTTTHKTLRGPRGGMIMMGKDFENPLGLTINTKNGSRVKMMSEVIDAEVMPGIQGGPLMHIIAGKAVAFGEALQPEFKAYAQQIKDNAAAMAAKFLAAGYHIVSGGTKNHLMLLDLRNKNVNGKVAENLLHEAGITVNKNMVPFDDKSPFVTSGIRIGTPAMTTRGMKVAEAEKIVEFIDRVISAANDANVADVCKAVRAEVRELCLGFPLNNYGSLV

SEQ ID NO: 9853 - DNA, 1278 bp, Thermosynechococcus elongatus BP-1
  CDS (1)..(1278): transl_table=11
atgacccatattgattggcttgtgcaaacggatccgttggtcgctgaaatggtacagcgggaagtccagcggcagcagcaacacctcgaactgattgccagtgaaaactttacttcccctgcggtgatggccgctcaagggacagttctcaccaataaatacgccgagggattgccgggcaaacgctactacggtggctgcgagtttgtggatgaagtggagcaactggccatcgatcgcgccaaggaactctttggtgctgcccacgccaacgttcagcctcactccggtgcccaagccaattttgccgtctttttggccctcctcaatcccggggacacgattatggggatggatttgtcccacggtggccatctaacccacggttcccccgtcaacgtttccggtaaatggtttaacgtcgttcactatggtgttcatcctgaaacggaacgcctcgatatggatcaggtgcgggatttagcacggcagcaccgtcccaagctaattatctgtggctattccgcctatcctcgcgtcattccctttgctgagtttcgccaaattgccgatgaagtgggtgcctatctcatggctgatattgcccacattgccggtttagtcgccagtggttaccatcccaatcccgtccccctctgcgatgtcgtgacaaccaccacccataaaaccctgcgcggtcctcgcggcggcctgattctgacccgtgatgaagacttaggcaaaaagttggataaagcggtttttcccggtacccaaggggggccactggagcatgtgattgccgctaaggccgtggcctttggtgaggctctcaaaccagaattcaaagcctattgtgggcaagtgattcgcaacgcccaagccctcgctgcggggctgcaagcgcggcaactgcgccttgtttcaggaggcaccgataaccatttgatgctcattgacctgcgatcggtgaatctaacgggcaaagaggccgatcgccttatgggggaaatccatatcaccaccaataaaaacaccattccctttgaccccgcctccccttttgttaccagtggtctgcgtttgggaacgccagccttgacaacccgtggcttcacagaagtcgagtttgcagaagtagctgaaatcattagcgatcgcctgcatgccccagaggatgaagccatcaaaaatcgctgccgcgagcgggtggctgccctctgcgctcaatttcccctctatccccacttgcaattcccgcaaccagtgctagcctaa

SEQ ID NO: 9854 - protein, 425 aa, Thermosynechococcus elongatus BP-1
MTHIDWLVQTDPLVAEMVQREVQRQQQHLELIASENFTSPAVMAAQGTVLTNKYAEGLPGKRYYGGCEFVDEVEQLAIDRAKELFGAAHANVQPHSGAQANFAVFLALLNPGDTIMGMDLSHGGHLTHGSPVNVSGKWFNVVHYGVHPETERLDMDQVRDLARQHRPKLIICGYSAYPRVIPFAEFRQIADEVGAYLMADIAHIAGLVASGYHPNPVPLCDVVTTTTHKTLRGPRGGLILTRDEDLGKKLDKAVFPGTQGGPLEHVIAAKAVAFGEALKPEFKAYCGQVIRNAQALAAGLQARQLRLVSGGTDNHLMLIDLRSVNLTGKEADRLMGEIHITTNKNTIPFDPASPFVTSGLRLGTPALTTRGFTEVEFAEVAEIISDRLHAPEDEAIKNRCRERVAALCAQFPLYPHLQFPQPVLA

SEQ ID NO: 9855 - DNA, 1236 bp, Oceanobacillus iheyensis HTE831
  CDS (1)..(1236): transl_table=11
atggaatttgtgaaacaagcagataccgaagtgtttgaagcaatgcaagccgaaaaaaatcgccagcaagataagattgagttaattgcatccgaaaattttgtaacaaaagcagtaatggatgcgatgggatctattcttaccaataaatatgcagaaggttatccaggcaagcgttattatggtggttgtgagcatgttgatgtagtggaaaatcttgctcgtgatcgtgcgaaagaattatttggtgctgatcacgcaaatgtacaacctcattcaggagcacaagcaaatatggcagtttattctgcggtacttgagcctggtgatacggtactaggtatgaatctaaatcatggtggacatttaactcatggtagcccagtgaactttagcggtcaattgtataattttgttgactatggtgtagacaaagagacagaacaacttgattatgatgctgtattggaaaaagcaaaggaagtaaaacctaaattaatcgtggctggagcaagtgcatactcccgttctattaattttgctaaattccgtgaaattgctgatgcagtagatgcatatctaatggtagatatggcacatattgctggtttagttgctactggtgaacatgaaaatccagttcctcatgcagattttgttactactacaacccataaaacattgcgcggacctcgtggtggtatgattctttgtaaagaagaatttgccaaaaaagtagataaagcgattttccctggaatccaaggtggaccgttaatgcatgttattgctgcaaaagctgtatcctttaaagaagcattgtcagatgactttaaagcatattcaaagcaaattgttgcaaatgcaaaattactaggggaagctctcaataaagaaggaattcgtattgtatctggaggtacagataaccatctactattattagatgttactccattacaattaaccggaaaagtagctgaaaaagcactagatgatatcggtattacaacgaataaaaacacgattccttttgatcaagaaagtccttttgtaacaagtggtatccgtattggtactgctgcagtaactacacgtggatttggtgaagaagaaatgaaagaaattgcttctattatttctttaacgttaaaacaccatgaagatgaagcgaagttaaaagaagcagcacaacgtgtacaagcacttacagaaaaattcacgctatatgcttaa

SEQ ID NO: 9856 - protein, 411 aa, Oceanobacillus iheyensis HTE831
MEFVKQADTEVFEAMQAEKNRQQDKIELIASENFVTKAVMDAMGSILTNKYAEGYPGKRYYGGCEHVDVVENLARDRAKELFGADHANVQPHSGAQANMAVYSAVLEPGDTVLGMNLNHGGHLTHGSPVNFSGQLYNFVDYGVDKETEQLDYDAVLEKAKEVKPKLIVAGASAYSRSINFAKFREIADAVDAYLMVDMAHIAGLVATGEHENPVPHADFVTTTTHKTLRGPRGGMILCKEEFAKKVDKAIFPGIQGGPLMHVIAAKAVSFKEALSDDFKAYSKQIVANAKLLGEALNKEGIRIVSGGTDNHLLLLDVTPLQLTGKVAEKALDDIGITTNKNTIPFDQESPFVTSGIRIGTAAVTTRGFGEEEMKEIASIISLTLKHHEDEAKLKEAAQRVQALTEKFTLYA

SEQ ID NO: 9857 - DNA, 1524 bp, Caenorhabditis elegans
  CDS (1)..(1524)
atgtttgcaaggatagtgagcagaagagcagcaactggattatttgccggagccagctcccagtgtaaaatggctgatcgtcaagtgcacacaccattggctaaagttcagcgccacaagtacaccaacaacgagaacattttggtggaccatgttgagaaagttgatccagaagttttcgatatcatgaaaaatgagaagaagcggcagcgtcgtggacttgagctcatcgcttccgagaacttcacaagcaaggctgttatggatgctcttggctcggcaatgtgcaacaaatacagtgaaggataccctggagctcggtattacggaggaaatgagttcatcgatcagatggagctcctttgccagaagagagctcttgaggtattcggacttgatccagccaagtggggagtcaatgtgcagccattgtccggatcaccagccaatttcgcagtctacactgccatcgttggatccaatggacgcattatgggcctcgatcttccagatggaggtcatttgactcatggattcttcaccccagctcgcaaagtctctgcgacttctgaattcttccagtctcttccatacaaggttgatccaacaactggattgatcgactatgacaagcttgagcagaatgcaatgcttttccgtccaaaagccatcattgccggagtttcctgctacgctcgtcatctcgattatgaacgtttccgtaagattgccacaaaggctggagcctatttgatgtctgatatggctcacatctccggacttgttgccgctggacttatcccatcaccattcgagtattctgatgttgtaaccacaacgacgcacaagtcgctcagaggaccacgtggagctttgatcttctacagaaagggtgtccgatctaccaacgcaaagggagttgacactttgtatgatttggaggagaagatcaactcggccgtgttcccaggacttcaaggtggaccacacaatcacactattgctggaattgccgttgctttgagacaatgcctttctgaagattttgttcagtacggagagcaagtgttgaagaatgccaaaaccttggccgagagaatgaagaagcatggatatgctttggcaaccggaggaaccgacaatcatttgttgcttgttgacttgcgcccaatcggagttgaaggagctcgtgctgagcatgtgcttgatctcgctcatattgcttgcaacaagaatacgtgcccaggagacgtttctgctttgagaccaggaggcattcgtctcggaactccagctctcacctcccgtggattccaggagcaagatttcgagaaagtcggagatttcattcatgagggtgttcaaatcgcaaagaagtacaatgctgaggctggaaagacattgaaagacttcaaatcattcactgagaccaatgaaccattcaagaaagacgtcgctgatctcgccaaacgtgttgaggagttctccacgaagttcgagattccaggaaacgaaactttctaa

SEQ ID NO: 9858 - protein, 507 aa, Caenorhabditis elegans
MFARIVSRRAATGLFAGASSQCKMADRQVHTPLAKVQRHKYTNNENILVDHVEKVDPEVFDIMKNEKKRQRRGLELIASENFTSKAVMDALGSAMCNKYSEGYPGARYYGGNEFIDQMELLCQKRALEVFGLDPAKWGVNVQPLSGSPANFAVYTAIVGSNGRIMGLDLPDGGHLTHGFFTPARKVSATSEFFQSLPYKVDPTTGLIDYDKLEQNAMLFRPKAIIAGVSCYARHLDYERFRKIATKAGAYLMSDMAHISGLVAAGLIPSPFEYSDVVTTTTHKSLRGPRGALIFYRKGVRSTNAKGVDTLYDLEEKINSAVFPGLQGGPHNHTIAGIAVALRQCLSEDFVQYGEQVLKNAKTLAERMKKHGYALATGGTDNHLLLVDLRPIGVEGARAEHVLDLAHIACNKNTCPGDVSALRPGGIRLGTPALTSRGFQEQDFEKVGDFIHEGVQIAKKYNAEAGKTLKDFKSFTETNEPFKKDVADLAKRVEEFSTKFEIPGNETF

SEQ ID NO: 9859 - DNA, 1455 bp, Caenorhabditis elegans
  CDS (1)..(1455)
atggctgatcgtcaagtgcacacaccattggctaaagttcagcgccacaagtacaccaacaacgagaacattttggtggaccatgttgagaaagttgatccagaagttttcgatatcatgaaaaatgagaagaagcggcagcgtcgtggacttgagctcatcgcttccgagaacttcacaagcaaggctgttatggatgctcttggctcggcaatgtgcaacaaatacagtgaaggataccctggagctcggtattacggaggaaatgagttcatcgatcagatggagctcctttgccagaagagagctcttgaggtattcggacttgatccagccaagtggggagtcaatgtgcagccattgtccggatcaccagccaatttcgcagtctacactgccatcgttggatccaatggacgcattatgggcctcgatcttccagatggaggtcatttgactcatggattcttcaccccagctcgcaaagtctctgcgacttctgaattcttccagtctcttccatacaaggttgatccaacaactggattgatcgactatgacaagcttgagcagaatgcaatgcttttccgtccaaaagccatcattgccggagtttcctgctacgctcgtcatctcgattatgaacgtttccgtaagattgccacaaaggctggagcctatttgatgtctgatatggctcacatctccggacttgttgccgctggacttatcccatcaccattcgagtattctgatgttgtaaccacaacgacgcacaagtcgctcagaggaccacgtggagctttgatcttctacagaaagggtgtccgatctaccaacgcaaagggagttgacactttgtatgatttggaggagaagatcaactcggccgtgttcccaggacttcaaggtggaccacacaatcacactattgctggaattgccgttgctttgagacaatgcctttctgaagattttgttcagtacggagagcaagtgttgaagaatgccaaaaccttggccgagagaatgaagaagcatggatatgctttggcaaccggaggaaccgacaatcatttgttgcttgttgacttgcgcccaatcggagttgaaggagctcgtgctgagcatgtgcttgatctcgctcatattgcttgcaacaagaatacgtgcccaggagacgtttctgctttgagaccaggaggcattcgtctcggaactccagctctcacctcccgtggattccaggagcaagatttcgagaaagtcggagatttcattcatgagggtgttcaaatcgcaaagaagtacaatgctgaggctggaaagacattgaaagacttcaaatcattcactgagaccaatgaaccattcaagaaagacgtcgctgatctcgccaaacgtgttgaggagttctccacgaagttcgagattccaggaaacgaaactttctaa

SEQ ID NO: 9860 - protein, 484 aa, Caenorhabditis elegans
MADRQVHTPLAKVQRHKYTNNENILVDHVEKVDPEVFDIMKNEKKRQRRGLELIASENFTSKAVMDALGSAMCNKYSEGYPGARYYGGNEFIDQMELLCQKRALEVFGLDPAKWGVNVQPLSGSPANFAVYTAIVGSNGRIMGLDLPDGGHLTHGFFTPARKVSATSEFFQSLPYKVDPTTGLIDYDKLEQNAMLFRPKAIIAGVSCYARHLDYERFRKIATKAGAYLMSDMAHISGLVAAGLIPSPFEYSDVVTTTTHKSLRGPRGALIFYRKGVRSTNAKGVDTLYDLEEKINSAVFPGLQGGPHNHTIAGIAVALRQCLSEDFVQYGEQVLKNAKTLAERMKKHGYALATGGTDNHLLLVDLRPIGVEGARAEHVLDLAHIACNKNTCPGDVSALRPGGIRLGTPALTSRGFQEQDFEKVGDFIHEGVQIAKKYNAEAGKTLKDFKSFTETNEPFKKDVADLAKRVEEFSTKFEIPGNETF

SEQ ID NO: 9861 - DNA, 1251 bp, Vibrio vulnificus CMCP6
  CDS (1)..(1251): transl_table=11
atgcttaagcgtgatatgaatatcgctgattacgatgcggagctattcgcagctatccaggaagaaactcttcgccaggaagaacacatcgagctgatcgcttcagaaaactacacaagcccacgtgtaatggaagctcaaggctctcagctaaccaataagtacgctgaaggctacccaggcaagcgttactacggtggctgtgaatatgttgataaagcggaagcactcgcaattgatcgcgcatgccagttgttcggttgtgaatatgcaaacgtacagcctcactcaggttctcaagcaaacagtgcagtgtatatggcgctgcttaacccaggcgacactgtattaggtatgagccttgcgcacggtggccacttgacgcacggctcaccagttaacttctctggtaagcactacaacgttatcccttacggtatcgatgaagcgggtcaaattaactacgacgagatggaaacgctagcgcttgagcacaaacctaagatgatcatcggtggtttctcagcgtactctcaaatcgttgattggaagcgtatgcgtgaaatcgcggacaaagttgacgcttacctattcgtcgatatggcgcacgttgcgggtcttatcgcagcaggtgaatatccaacaccagttcctcacgcacacgtagtgacgacgacaacgcacaaaacgctagcaggtccacgtggtggtcttatcctgtctaacgctggcgaagacatgtacaagaaactgaactcagccgttttccctggtggtcagggtggccctctgatgcacgttatcgctggtaaagcagtagcgttcaaagaagcgatggaacctgagtttaaagcttaccaagcgcgcgtagtgaaaaatgcaaaagcgatggtggctcagttccaagagcgcggttacaaaatcgtatctaacggtacagaaaaccacctgttccttgttgaccttatcgacaaagacatcacgggtaaagatgcggatgcggcactaggcgcagcaaacatcacggtaaacaagaactcagtaccaaacgaccctcgtagcccatttgtcacttcgggtattcgtgttggtacgcctgcgattactcgccgtggctttacggaagcggacgcgaaagagctagcaaactggatgtgtgacgtattagataacatcggcaatgaagcggttatcgaagcaacgaaacagaaagtactagaaatctgtaagcgtctacctgtttacgcataa

SEQ ID NO: 9862 - protein, 416 aa, Vibrio vulnificus CMCP6
MLKRDMNIADYDAELFAAIQEETLRQEEHIELIASENYTSPRVMEAQGSQLTNKYAEGYPGKRYYGGCEYVDKAEALAIDRACQLFGCEYANVQPHSGSQANSAVYMALLNPGDTVLGMSLAHGGHLTHGSPVNFSGKHYNVIPYGIDEAGQINYDEMETLALEHKPKMIIGGFSAYSQIVDWKRMREIADKVDAYLFVDMAHVAGLIAAGEYPTPVPHAHVVTTTTHKTLAGPRGGLILSNAGEDMYKKLNSAVFPGGQGGPLMHVIAGKAVAFKEAMEPEFKAYQARVVKNAKAMVAQFQERGYKIVSNGTENHLFLVDLIDKDITGKDADAALGAANITVNKNSVPNDPRSPFVTSGIRVGTPAITRRGFTEADAKELANWMCDVLDNIGNEAVIEATKQKVLEICKRLPVYA

SEQ ID NO: 9863 - DNA, 1239 bp, Staphylococcus epidermidis ATCC 12228
  CDS (1)..(1239): transl_table=11
atgtcttatatcgagaaaaaggataaagttgtttacgatgctattcaaaaggagtttcaacgacaaaatagtaatattgaactcattgcatcagaaaatttcgtatcacaagcagttatggaagcccaaggttcagtattaacgaataaatatgctgagggttatcctgggcgtcgttattatggagggtgtgagcatgtagatgtaactgagtccattgccattgaaagagcaaaagctttatttggagcagaacatgttaatgttcaaccccattcaggttctcaagctaatatggctgtgtatttggttgctttagaaatgggcgatactgtgttaggtatgaatttgagtcatggtggtcatttaacacatggggcaactgtcaattttagtggtaaattttatcattttgttgaatatggtgtggaccaagaaaatgaattaataaactatgatgaagtgagacgtttagcaattgagcatcaacctaaattaattgtagctggtgcttcagcatattcaagaactattgactttaaaaaatttaaagaaattgctgatgaagtaggagctaaattgatggtagatatggcacatattgctggtttagtagctgctggtttacatcctaatcctgtagaatatgctgattttgtgactactacaactcataaaactttacgcggtccacgtggtggtatgattttatgtaaagaagaatataaaaaagatatagataaaacaatcttcccaggtattcaaggcggtccattagaacatgtcatcgccgcaaaagctgttgcatttggagaagctttgaacgacgattttaaagattatcaaaatcaagtcattaaaaatgcacaagctttagctcaaacattaattgaagaaggcttcagagttgtatctggcggaacagacaatcatttagttgcagttgatgttaaaggttctatcaatatgactggtaaattagctgaagagacacttgataaagtaggaattacatgtaataagaatactattccatttgataaagaaaaaccgtttgtaacaagtggtgttagactaggaacaccagcagctacaactcgtggttttgatgaatctgcatttgtggaagtagcaaaaattattagtttagcattaaataactatgataatgatactaaactaaatgaagctaaagagagagttcacgcactcacatctaaatatccattatataattaa

SEQ ID NO: 9864 - protein, 412 aa, Staphylococcus epidermidis ATCC 12228
MSYIEKKDKVVYDAIQKEFQRQNSNIELIASENFVSQAVMEAQGSVLTNKYAEGYPGRRYYGGCEHVDVTESIAIERAKALFGAEHVNVQPHSGSQANMAVYLVALEMGDTVLGMNLSHGGHLTHGATVNFSGKFYHFVEYGVDQENELINYDEVRRLAIEHQPKLIVAGASAYSRTIDFKKFKEIADEVGAKLMVDMAHIAGLVAAGLHPNPVEYADFVTTTTHKTLRGPRGGMILCKEEYKKDIDKTIFPGIQGGPLEHVIAAKAVAFGEALNDDFKDYQNQVIKNAQALAQTLIEEGFRVVSGGTDNHLVAVDVKGSINMTGKLAEETLDKVGITCNKNTIPFDKEKPFVTSGVRLGTPAATTRGFDESAFVEVAKIISLALNNYDNDTKLNEAKERVHALTSKYPLYN

SEQ ID NO: 9865 - DNA, 1239 bp, Lactobacillus plantarum WCFS1
  CDS (1)..(1239): transl_table=11
atgaattaccaggaacaagatccagaagtatgggctgcgattagtaaggaacaggcacggcaacaacataatattgagttgattgcttctgagaacatcgtttcaaagggcgtccgggcagcgcaggggagtgtgctgaccaataaatactctgaaggctatccgggtcaccgcttttacggtggtaacgaatacattgaccaagtggaaaccttagcaattgaacgggctaagaaattatttggtgcggaatatgctaatgtgcaaccacactctggttcccaagccaatgcggctgcatatatggcactgattcaacctggtgaccgggtgatggggatgtcactagatgctgggggacacttaacacatggatctagtgtgaacttctctggtaaactttacgattttcaaggttatgggctcgatcctgaaaccgcagaattaaactatgatgcaattcttgcacaagcacaagattttcaaccaaagttaatcgttgcgggggcttctgcttatagtcgattgattgatttcaagaagtttcgcgagattgcagatcaagttggggccttattgatggttgatatggctcatattgccggcttagttgcggccgggctacatcctaatccagtgccatatgctgatgtggttacgacaacgacgcacaaaacgttacgggggccccgtggcggtatgattttagcgaaagaaaagtatggcaagaagatcaactcagccgttttccctggcaatcagggtgggccgttggatcacgtaattgcgggtaaagcgattgctttgggcgaagacttacagcctgagtttaaggtttatgcccaacatatcattgataatgccaaggcaatggcgaaggtcttcaatgactctgacttggttcgggttatttctggtggcacggacaatcatttaatgacgattgatgtcactaagtctggtttgaacggtcgccaagtacaagatctgttagatacggtttatattacggtcaacaaagaagcgattccgaatgagacgttaggggctttcaagacctctggtattcggttgggaacacctgcgattacgacccgtggttttgacgaagctgatgcaactaaggtcgctgaattgattttgcaagcgttacaagcaccgacagatcaagcaaatctagatgacgttaaacagcaagcaatggctttaacagcgaagcacccgatcgatgttgattaa

SEQ ID NO: 9866 - protein, 412 aa, Lactobacillus plantarum WCFS1
MNYQEQDPEVWAAISKEQARQQHNIELIASENIVSKGVRAAQGSVLTNKYSEGYPGHRFYGGNEYIDQVETLAIERAKKLFGAEYANVQPHSGSQANAAAYMALIQPGDRVMGMSLDAGGHLTHGSSVNFSGKLYDFQGYGLDPETAELNYDAILAQAQDFQPKLIVAGASAYSRLIDFKKFREIADQVGALLMVDMAHIAGLVAAGLHPNPVPYADVVTTTTHKTLRGPRGGMILAKEKYGKKINSAVFPGNQGGPLDHVIAGKAIALGEDLQPEFKVYAQHIIDNAKAMAKVFNDSDLVRVISGGTDNHLMTIDVTKSGLNGRQVQDLLDTVYITVNKEAIPNETLGAFKTSGIRLGTPAITTRGFDEADATKVAELILQALQAPTDQANLDDVKQQAMALTAKHPIDVD

SEQ ID NO: 9867 - DNA, 1254 bp, Pseudomonas syringae pv. tomato str. DC3000
  CDS (1)..(1254): transl_table=11
atgttcagcaagcaagaccagattcagggttatgacgacgcactgttgtcggcaatgaacgccgaggagcagcgtcaggaagaccatatcgagctgatcgcctcggagaactacaccagcaagcgcgtcatgcaggcccaaggcagcggcctgaccaacaaatacgccgaaggctatcccggcaagcgctactacggcggttgcgagcacgtcgacaaggtcgagcaactggccatcgaacgcgccagacagctgttcggtgccgattacgccaacgtccagccacactccggcagccaggccaacgcggcggtctacctggcgctgctgcaggcaggcgacacggtgctgggaatgagccttgcgcacggcggccacctgacccacggtgccaaagtcagtttctcgggcaagctgtacaacgccgtgcagtacggcatcgacaccaccaccggcctgatcgattacgacgaagtcgaacgcatcgccgtcgaatgccagccaaaaatgctcattgccggtttctcggcctattccaaaacgctggatttcccgcgttttcgtgcaatcgccgacaaggtgggtgcctacctgttcgtcgacatggcccacgttgcaggtctggtggctgccggtctttatccaaacccgctgccgtatgccgatgtggtcaccaccaccacgcacaagacactgcgtggcccgcgcggcggtctgatccttgccaaggccaacgaagagctggagaagaaattcaattcagccgtcttccccggtggtcagggcggcccgttgatgcacgtcattgcggccaaggccgtgtgcttcaaggaagcgatggagcccggcttcaagacgtatcagcagcaggtcatcgataacgcacaagcgatggcgcaagtcttcatcacgcgcggcttcgacgtggtttccggcggcaccgacaaccacctgtttctggtcagcctgatccgtcagggcctgaccggcaaagaagccgacgccgcgctaggccgtgcgcacatcaccgtcaacaagaactcggtgcccaacgacccgcagtcgccatttgtcacctcgggcctgcgcatcggcaccccggccgtcaccactcgcggtttcaaggtcacccagtgcatcgaactggcaggctggatatgcgacattctcgacaacctcggcgccgccgatgtcgaggccaacgtcgccagccaggtagcagccctgtgcgccgatttcccggtttatcgctga

SEQ ID NO: 9868 - protein, 417 aa, Pseudomonas syringae pv. tomato str. DC3000
MFSKQDQIQGYDDALLSAMNAEEQRQEDHIELIASENYTSKRVMQAQGSGLTNKYAEGYPGKRYYGGCEHVDKVEQLAIERARQLFGADYANVQPHSGSQANAAVYLALLQAGDTVLGMSLAHGGHLTHGAKVSFSGKLYNAVQYGIDTTTGLIDYDEVERIAVECQPKMLIAGFSAYSKTLDFPRFRAIADKVGAYLFVDMAHVAGLVAAGLYPNPLPYADVVTTTTHKTLRGPRGGLILAKANEELEKKFNSAVFPGGQGGPLMHVIAAKAVCFKEAMEPGFKTYQQQVIDNAQAMAQVFITRGFDVVSGGTDNHLFLVSLIRQGLTGKEADAALGRAHITVNKNSVPNDPQSPFVTSGLRIGTPAVTTRGFKVTQCIELAGWICDILDNLGAADVEANVASQVAALCADFPVYR

SEQ ID NO: 9869 - DNA, 1254 bp, Pseudomonas syringae pv. tomato str. DC3000
  CDS (1)..(1254): transl_table=11
atgttcagccgtgatttgactatcgccaagtacgacgccgatctgtttgccgccatggagcaagaagctctgcgtcaggaagaacatatcgagctgatcgcctcggaaaactacaccagtccggccgtcatggaagctcaaggctcggtactgaccaacaagtacgctgaaggctacccaggcaagcgttattacggtggctgcgagtacgtcgacgttgtcgagcaactggctatcgaccgtgccaaagagctgttcggcgccgactacgccaacgtccagccacacgccggttcgcaagccaactcggcggtctacctggctctgctgcaaggcggcgacaccattctgggcatgagcctggctcacggcggtcacttgacccacggtgccagcgtgtcctcctcgggcaagctgtacaacgctgttcagtacggcatcgacggcaacggcatgatcgactacgacgaagtcgagcgcctggctgttgaacacaagccaaaaatgatcgttgccgggttctctgcctactcgcagatcctcgacttcccgcgcttccgtgccattgccgacaaggtcggtgcctacctgttcgtcgacatggcgcacgtagccggtctggttgccgcaggtgtctacccgaacccggtgccgttcgccgacgtcgtcaccaccaccacgcacaagaccttgcgcggtccacgtggcggtctgatcctggctcgcgccaacgccgacatcgagaagaagctcaactccgccgtattccctggctcccagggcggtccgctggagcacgtcatcgcagccaaggccatctgcttcaaggaagcgttgcagcctgagttcaagacctaccagcaacaagtggtcaagaacgccaaggcaatggccggcgtgttcatcgagcgcggtttcgacgtggtgtccggcggtactgaaaaccacctgttcctgctctcgctgatcaagcaggacatctccggtaaagacgccgacgccgcattgggtcgcgccttcatcaccgtcaacaagaactcggtacccaacgacccacgctccccgttcgtcacctccggcctgcgcttcggcaccccggcagtgaccactcgcggcttcaaggaaacagagtgcaaagaactggccggctggatctgcgacatcctggcggacctgaacaacgaagccgtgatcgacgctgtccgtgagaaggtcaaggccatctgcgcgaagctgccggtttacggcgcttga

SEQ ID NO: 9870 - protein, 417 aa, Pseudomonas syringae pv. tomato str. DC3000
MFSRDLTIAKYDADLFAAMEQEALRQEEHIELIASENYTSPAVMEAQGSVLTNKYAEGYPGKRYYGGCEYVDVVEQLAIDRAKELFGADYANVQPHAGSQANSAVYLALLQGGDTILGMSLAHGGHLTHGASVSSSGKLYNAVQYGIDGNGMIDYDEVERLAVEHKPKMIVAGFSAYSQILDFPRFRAIADKVGAYLFVDMAHVAGLVAAGVYPNPVPFADVVTTTTHKTLRGPRGGLILARANADIEKKLNSAVFPGSQGGPLEHVIAAKAICFKEALQPEFKTYQQQVVKNAKAMAGVFIERGFDVVSGGTENHLFLLSLIKQDISGKDADAALGRAFITVNKNSVPNDPRSPFVTSGLRFGTPAVTTRGFKETECKELAGWICDILADLNNEAVIDAVREKVKAICAKLPVYGA

SEQ ID NO: 9871 - DNA, 1251 bp, Vibrio parahaemolyticus RIMD 2210633
  CDS (1)..(1251): transl_table=11
atgcttaagcgtgatatgaacatcgcagattacgatgcggaactgttcgcagctatccaggaagaaacccttcgccaggaagaacacattgaacttatcgcttctgaaaactacacaagcccacgtgtaatggaagcgcaaggttctcagctaacgaacaaatacgctgaaggctacccaggcaagcgttactacggcggttgtgagtacgtagataaagcagaacagcttgctatcgatcgtgcatgcaaactattcggttgtgagtacgcgaacgtacaacctcactcaggttctcaagcaaacagcgcagtttacatggcgcttcttaacccaggagatacagtactaggtatgagcctagcgcacggtggtcacctgactcacggttctccagtaaacttctctggtaagcattacaacgttatcccttacggtatcgatgaagcgggtcaaatcaattacgacgagatggaacagctagcgcttgagcacaagcctaagatgatcatcggtggtttttctgcttactcgcaaatcgttgattggaagcgcatgcgtgaaatcgcggacaaagtagatgcttaccttttcgttgatatggcacacgtagctggtcttatcgcagcaggcgaatacccaacacctgttccacacgctcacgtagtaacaacaacgacgcacaaaacactagcaggccctcgcggtggtcttatcttgtctaatgctggcgaagatatgtacaagaagctgaactcagctgtgttccctggtggtcaaggtggccctctaatgcacgttatcgctggtaaagcagtagcgttcaaagaagcgatggagccagagttcaaagcttaccaagctcgcgtagtgaaaaacgcaaaagcaatggttggtcagttccaagagcgtggctacaaaatcgtatctaacggcacagaaaaccacttgttccttgtggatctaatcgacaaagacatcactggtaaagatgcagacgcggcactaggtgcagcaaacatcacagtaaacaagaactcagtaccaaatgacccacgcagcccattcgtaacgtctggtattcgtgtaggtacaccagcgatcactcgtcgtggctttactgaagaagacgcaaaagatctagcaaactggatgtgtgacgttctagataacatcggcaacgaagaagttatcgaagcgactaaacagaaagtattagaaatctgtaagcgtctaccggtttacgcctaa

SEQ ID NO: 9872 - protein, 416 aa, Vibrio parahaemolyticus RIMD 2210633
MLKRDMNIADYDAELFAAIQEETLRQEEHIELIASENYTSPRVMEAQGSQLTNKYAEGYPGKRYYGGCEYVDKAEQLAIDRACKLFGCEYANVQPHSGSQANSAVYMALLNPGDTVLGMSLAHGGHLTHGSPVNFSGKHYNVIPYGIDEAGQINYDEMEQLALEHKPKMIIGGFSAYSQIVDWKRMREIADKVDAYLFVDMAHVAGLIAAGEYPTPVPHAHVVTTTTHKTLAGPRGGLILSNAGEDMYKKLNSAVFPGGQGGPLMHVIAGKAVAFKEAMEPEFKAYQARVVKNAKAMVGQFQERGYKIVSNGTENHLFLVDLIDKDITGKDADAALGAANITVNKNSVPNDPRSPFVTSGIRVGTPAITRRGFTEEDAKDLANWMCDVLDNIGNEEVIEATKQKVLEICKRLPVYA

SEQ ID NO: 9873 - DNA, 1281 bp, Bacteroides thetaiotaomicron VPI-5482
  CDS (1)..(1281): transl_table=11
atgaaaagagacgacttaattttcgacatcatcgaaaaagagcaccaacgtcagctgaaaggtatcgagctgattgcatctgaaaactttgtaagtgaccaggtaatgcaggcaatgggttcttgcctgactaacaagtacgcagaaggttatccgggcaaacgttactacggaggttgtgaagtagttgaccaaagcgaacaaatcgctatcgaccgcctgaaagaaatcttcggtgccgaatgggcaaacgtacaaccgcattcaggagcacaagccaatgcagccgtatttctggctgttttgaatccaggcgacaagtttatgggattaaacctcgcacacggcggacacctttctcacggttcattagtaaacacttccggcattatctacactccttgcgaatacaatctgaatcaggaaaccggccgtgtagactacgaccagatggaagaagttgctttgcgcgaaaagccgaaaatgattatcggcggcggctctgcttattcccgcgaatgggactacaaacgtatgcgtgaaatcgcagataaagtaggcgctatcctgatgatcgacatggctcaccctgcgggtctgatcgctgccggactgttggagaacccggttaaatatgcacacatcgtcacttcgactacacataaaacacttcgcggacctcgtggtggggtcatcatgatgggaaaagatttccctaatccttggggaaagaaaactccgaagggtgaaatcaaaatgatgtctcaattactggattcagctgtattcccaggtgtacagggcggaccgttggaacacgtaatcgctgccaaagccgtagctttcggtgaaatcctgcaaccggaatacaaggaatatgcaaaacaggttcagaagaatgctgccatactggcacaggccttgatagaccgtggttttacaatcgtttccggtggtacggacaatcactccatgctggttgacctgcgtagcaaataccctgatctgacaggtaaggtagcagaaaaagcattagtttctgctgacattaccgtgaataagaacatggttccgtttgacagccgttctgctttccaaacttccggtatccgtctgggtactcctgccatcacaacccgtggtgcgaaagaagacctgatgatcgaaattgccgaaatgatcgaaacagttctgtctaacgtggaaaatgaagaggtgatcgcacaagtacgtgcacgtgtcaatgagacaatgaagaaatatcctctttttgctgattaa

SEQ ID NO: 9874 - protein, 426 aa, Bacteroides thetaiotaomicron VPI-5482
MKRDDLIFDIIEKEHQRQLKGIELIASENFVSDQVMQAMGSCLTNKYAEGYPGKRYYGGCEVVDQSEQIAIDRLKEIFGAEWANVQPHSGAQANAAVFLAVLNPGDKFMGLNLAHGGHLSHGSLVNTSGIIYTPCEYNLNQETGRVDYDQMEEVALREKPKMIIGGGSAYSREWDYKRMREIADKVGAILMIDMAHPAGLIAAGLLENPVKYAHIVTSTTHKTLRGPRGGVIMMGKDFPNPWGKKTPKGEIKMMSQLLDSAVFPGVQGGPLEHVIAAKAVAFGEILQPEYKEYAKQVQKNAAILAQALIDRGFTIVSGGTDNHSMLVDLRSKYPDLTGKVAEKALVSADITVNKNMVPFDSRSAFQTSGIRLGTPAITTRGAKEDLMIEIAEMIETVLSNVENEEVIAQVRARVNETMKKYPLFAD

SEQ ID NO: 9875 - DNA, 1554 bp, Arabidopsis thaliana
  CDS (1)..(1554)
atggcgttggctcttcgtagactctcctcttccgttaagaaaccgatctcgcttctctcctctaatggcggttcactccgtttcatgtcgtctttatcaaccgcagctatggcggaatcggagaaatctcgttctagttggattaagcaattgaatgcatctctagatgaaatcgatcctgaagttgcggatattatcgaattagagaaggctagacaatggaagggatttgaacttataccgtcagagaatttcacttctctatctgtgatgcaagccgttggttctgttatgactaataagtatagtgaaggataccctggagctagatactatggaggaaatgagtacattgacatggctgagacattatgtcaaaaacgcgcattagaagcttttcagttagatccttctaaatggggagtcaatgtgcagtctttatcaggatcaccagctaatttccaagtttacactgcattgttgaagcctcatgaaagaatcatggcacttgatttacctcatggtggacatctttctcatggttatcagactgacacgaagaaaatatcggctgtatccatcttttttgagacaatgccatacagattggatgagaacactggttacattgattatgaccagctagaaaagagtgccgtgcttttcagaccgaaacttattgttgcgggtgcaagtgcttatgctcgtctatatgactatgcacgtattcgtaaggtctgtaacaagcaaaaggcagttatgttggctgatatggctcatattagtgggttggttgctgctggcgttattccttctccttttgagtatgcagatgttgttacgactacaactcacaaatcgcttcgcggtcctagaggggctatgatattctttaggaaggggttaaaagagattaacaaacaagggaaagaggtcatgtatgactatgaggacagaattaatcaagctgtttttcctggactgcaaggtggtccacataatcacactataacgggtctagcagttgctctgaagcaggcaagaactcctgagtacaaggcctaccaggatcaagttctccgtaattgctcaaagtttgctgagactttgcttgcgaaaggatatgatttagtgtctggaggcactgataatcatttagttttggtgaatctgaaaaacaagggaatagatggatcaagagtggaaaaagtattagaattagtacatattgcagcaaacaagaatactgttcctggtgatgtttctgccatggttcccggtggcatccgtatgggaacaccagccctcacatcaagaggattcattgaggaagattttgcaaaagtggcggagtattttgatttagccgtcaagatagccttaaagatcaaagcagagtctcaaggaacaaagttgaaagactttgtagcaacaatgcaatcaaatgagaaattacagtcagagatgtcaaagctccgtgagatggtagaagaatatgctaagcaattcccaacgattgggttcgagaaagagacgatgagatacaaagagtag

SEQ ID NO: 9876 - protein, 517 aa, Arabidopsis thaliana
MALALRRLSSSVKKPISLLSSNGGSLRFMSSLSTAAMAESEKSRSSWIKQLNASLDEIDPEVADIIELEKARQWKGFELIPSENFTSLSVMQAVGSVMTNKYSEGYPGARYYGGNEYIDMAETLCQKRALEAFQLDPSKWGVNVQSLSGSPANFQVYTALLKPHERIMALDLPHGGHLSHGYQTDTKKISAVSIFFETMPYRLDENTGYIDYDQLEKSAVLFRPKLIVAGASAYARLYDYARIRKVCNKQKAVMLADMAHISGLVAAGVIPSPFEYADVVTTTTHKSLRGPRGAMIFFRKGLKEINKQGKEVMYDYEDRINQAVFPGLQGGPHNHTITGLAVALKQARTPEYKAYQDQVLRNCSKFAETLLAKGYDLVSGGTDNHLVLVNLKNKGIDGSRVEKVLELVHIAANKNTVPGDVSAMVPGGIRMGTPALTSRGFIEEDFAKVAEYFDLAVKIALKIKAESQGTKLKDFVATMQSNEKLQSEMSKLREMVEEYAKQFPTIGFEKETMRYKE

SEQ ID NO: 9877 - DNA, 1602 bp, Arabidopsis thaliana
  CDS (1)..(1602)
atggcgttggctcttcgtagactctcctcttccgttaagaaaccgatctcgcttctctcctctaatggcggttcactccgtttcatgtcgtctttatcaaccgcagctatggcggaatcggagaaatctcgttctagttggattaagcaattgaatgcatctctagatgaaatcgatcctgaagttgcggatattatcgaattagagaaggctagacaatggaagggatttgaacttataccgtcagagaatttcacttctctatctgtgatgcaagccgttggttctgttatgactaataagtatagtgaaggataccctggagctagatactatggaggaaatgagtacattgacatggctgagacattatgtcaaaaacgcgcattagaagcttttcagttagatccttctaaatggggagtcaatgtgcagtctttatcaggatcaccagctaatttccaagtttacactgcattgttgaagcctcatgaaagaatcatggcacttgatttacctcatggtggacatctttctcatggttatcagactgacacgaagaaaatatcggctgtatccatcttttttgagacaatgccatacagattggatgagaacactggttacattgattatgaccagctagaaaagagtgccgtgcttttcagaccgaaacttattgttgcgggtgcaagtgcttatgctcgtctatatgactatgcacgtattcgtaaggtctgtaacaagcaaaaggcagttatgttggctgatatggctcatattagtgggttggttgctgctggcgttattccttctccttttgagtatgcagatgttgttacgactacaactcacaaatcgcttcgcggtcctagaggggctatgatattctttaggaaggggttaaaagagattaacaaacaagggaaagaggtcatgtatgactatgaggacagaattaatcaagctgtttttcctggactgcaaggtggtccacataatcacactataacgggtctagcagttgctctgaagcaggcaagaactcctgagtacaaggcctaccaggatcaagttctccgtaattgctcaaagtttgctgagttggatataagacctactgtaatcatctcatatggcttgtcaatgcagactttgcttgcgaaaggatatgatttagtgtctggaggcactgataatcatttagttttggtgaatctgaaaaacaagggaatagatggatcaagagtggaaaaagtattagaattagtacatattgcagcaaacaagaatactgttcctggtgatgtttctgccatggttcccggtggcatccgtatgggaacaccagccctcacatcaagaggattcattgaggaagattttgcaaaagtggcggagtattttgatttagccgtcaagatagccttaaagatcaaagcagagtctcaaggaacaaagttgaaagactttgtagcaacaatgcaatcaaatgagaaattacagtcagagatgtcaaagctccgtgagatggtagaagaatatgctaagcaattcccaacgattgggttcgagaaagagacgatgagatacaaagagtag

SEQ ID NO: 9878 - protein, 533 aa, Arabidopsis thaliana
MALALRRLSSSVKKPISLLSSNGGSLRFMSSLSTAAMAESEKSRSSWIKQLNASLDEIDPEVADIIELEKARQWKGFELIPSENFTSLSVMQAVGSVMTNKYSEGYPGARYYGGNEYIDMAETLCQKRALEAFQLDPSKWGVNVQSLSGSPANFQVYTALLKPHERIMALDLPHGGHLSHGYQTDTKKISAVSIFFETMPYRLDENTGYIDYDQLEKSAVLFRPKLIVAGASAYARLYDYARIRKVCNKQKAVMLADMAHISGLVAAGVIPSPFEYADVVTTTTHKSLRGPRGAMIFFRKGLKEINKQGKEVMYDYEDRINQAVFPGLQGGPHNHTITGLAVALKQARTPEYKAYQDQVLRNCSKFAELDIRPTVIISYGLSMQTLLAKGYDLVSGGTDNHLVLVNLKNKGIDGSRVEKVLELVHIAANKNTVPGDVSAMVPGGIRMGTPALTSRGFIEEDFAKVAEYFDLAVKIALKIKAESQGTKLKDFVATMQSNEKLQSEMSKLREMVEEYAKQFPTIGFEKETMRYKE

SEQ ID NO: 9879 - DNA, 1260 bp, Prochlorococcus marinus subsp. marinus str. CCMP1375
  CDS (1)..(1260): transl_table=11
ttgcatacgattaattcagatctccgaaatacagatccagatatttcttttttaattaatcaagagctcttacggcaacaaacacatttagagctaattgctagtgagaactttgcttctgaggcagtaatggaagctcaaggatctgtcttaactaacaaatatgcagaaggtcttcctaataagcgttattacgggggctgcgagcatattgatgccattgaacaattagcaatcactcgagcacaaacacttttcaatgcagagtgggccaatgttcaacctcatagtggtgctcaagcaaattttgcagtgtttcttgctctattaaaccctggagacacaataatggggatggacctctcacatggtggtcatttaactcatggttctcctgtaaacgtaagcggcaaatggtttaacgctattcattacggtgtagatcaaactacaaaggttttgaactttgaacagataaggcaagttgccctaaaaaatcgaccaaaattaatcatctgtggattttctgcttatcctaggaccattgattttaaagcctttcgaagcatagctgatgaaatagatgcatatttactggcagacatagctcatattgctggactcgttgcatgtggagcccaccccaaccctgttccatattgtgatgtagttacaacgactacccacaaaactcttagaggtcctagagggggactaatcctatgcagagacaaagaatttgggaaaagatttgataaagctgttttcccaggaaatcaaggagggcctttggaacatgttattgctgcaaaagcagttgcctttggagaagcactgaaaccagaatttaaaacttatacttttcaagtaatttcaaatgctaaagccttagcaaaaaggattcaagaaagagggatatcaatcgtaagtgaaggaactgacaatcatattgttctactggatctaagaagtattgagatgacagggaaaaaagcagattctctaattagtgaagtcaacattacagctaataaaaatactgtcccttttgaccctgaatcaccttttgtcactagtggattaagactaggaactgctgctttgaccacaagagggtttactgaaaaagcgtttatagaagtggctgatgtaatagcagattgtcttttaaatccagaggatttatcaatcaaagaacaatgcaaagcaaaagtaatagatctatgtaatcgtttccccctttacaattcaaatcaataa

SEQ ID NO: 9880 - protein, 419 aa, Prochlorococcus marinus subsp. marinus str. CCMP1375
MHTINSDLRNTDPDISFLINQELLRQQTHLELIASENFASEAVMEAQGSVLTNKYAEGLPNKRYYGGCEHIDAIEQLAITRAQTLFNAEWANVQPHSGAQANFAVFLALLNPGDTIMGMDLSHGGHLTHGSPVNVSGKWFNAIHYGVDQTTKVLNFEQIRQVALKNRPKLIICGFSAYPRTIDFKAFRSIADEIDAYLLADIAHIAGLVACGAHPNPVPYCDVVTTTTHKTLRGPRGGLILCRDKEFGKRFDKAVFPGNQGGPLEHVIAAKAVAFGEALKPEFKTYTFQVISNAKALAKRIQERGISIVSEGTDNHIVLLDLRSIEMTGKKADSLISEVNITANKNTVPFDPESPFVTSGLRLGTAALTTRGFTEKAFIEVADVIADCLLNPEDLSIKEQCKAKVIDLCNRFPLYNSNQ

SEQ ID NO: 9881 - DNA, 1248 bp, Bordetella pertussis Tohama I
  CDS (1)..(1248): transl_table=11
atgttcaaccgcaacctgaccctcgaccaggtggatcccgacgtctgggccgccatccagaaagaagacgtacgccaggaacagcacatcgagctgatcgcgtccgagaactacgccagccccgccgtgatgcaggcccagggcacgcaactgaccaacaagtatgcggaaggctacccgggcaagcgctactacggcggttgcgagtacgtcgacgtggtcgagcagctggccatcgaccgcctgaagcagattttcggcgccgaggccgccaacgtgcagccgaactccggctcgcaggccaaccagggcgtgtacatggcggtgctcaagccgggcgataccgtgctgggcatgagcctggccgaaggcggtcacctgacgcacggcgcgtcggtcaacgcctcgggcaagctgtacaacttcgtgccctacggcctggacgccgacgaggtgctggactacgcccaggtcgagcggctgaccaaggaacacaagcccaagctgatcgtggccggcgcctccgcgtacgcgctgcacatcgacttcgagcgcatggcgcgcatcgcccacgacaacggcgcgctgttcatggtggacatcgcccactatgccggcctggtggccggcggcgcctatcccaacccggtgccgcacgccgatttcgtcacctccaccacgcacaagtcgctgcgcggcccgcgcggcggcgtcatcatgatgaaggccgagttcgagaaggccgtcaattcggccatcttcccgggcatccagggcggtccgctgatgcacgtcatcgcggccaaggccgtggccttcaaggaagcgctgtcgcccgagttccaggattacgcccagcaggtcgtcaagaacgccaaggtgctggccgatacgctggtcaagcgcggcctgcgcatcgtgtcgggcaggaccgaaagccacgtcatgctggtggacctgcgtcccaagggcattaccggcaaggaagcggaagcggtgctgggccaggcccacatcacggtcaacaagaacgccattcccaacgacccggaaaagcccttcgtgaccagcggcatccgcctgggcactccggccatgaccacccgcggcttcaaggaggccgaggccgagctgaccgccaacctgatcgccgacgtgctggacaatccgcgcgacgaggcgaacatcgccgcggtgcgcgcgcgggtcaatgaactgaccgcccgcctgcccgtctacggcaactga

SEQ ID NO: 9882 - protein, 415 aa, Bordetella pertussis Tohama I
MFNRNLTLDQVDPDVWAAIQKEDVRQEQHIELIASENYASPAVMQAQGTQLTNKYAEGYPGKRYYGGCEYVDVVEQLAIDRLKQIFGAEAANVQPNSGSQANQGVYMAVLKPGDTVLGMSLAEGGHLTHGASVNASGKLYNFVPYGLDADEVLDYAQVERLTKEHKPKLIVAGASAYALHIDFERMARIAHDNGALFMVDIAHYAGLVAGGAYPNPVPHADFVTSTTHKSLRGPRGGVIMMKAEFEKAVNSAIFPGIQGGPLMHVIAAKAVAFKEALSPEFQDYAQQVVKNAKVLADTLVKRGLRIVSGRTESHVMLVDLRPKGITGKEAEAVLGQAHITVNKNAIPNDPEKPFVTSGIRLGTPAMTTRGFKEAEAELTANLIADVLDNPRDEANIAAVRARVNELTARLPVYGN

SEQ ID NO: 9883 - DNA, 1290 bp, Prochlorococcus marinus str. MIT 9313
  CDS (1)..(1290): transl_table=11
atgacggatcgcttcttggcttctattaatgctgccctgacggattccgacccggcgattgcaggcttgatcgatcaggaaaggcaacgtcaggagacccatctagagctgatagccagtgagaacttcacttctcaagctgtgatgcaggctcagggttctgttctcaccaacaagtacgccgaaggtcttccccataagcgctattacggcggttgtgagcatgtcgatgcgattgaggagttggcgatcgagcgtgctcagcggctctttggtgcggcttgggccaacgtgcaacctcatagtggcgcgcaggccaacttcgccgtcttcctggcgctgttgcagcccggtgacaccatcatggggatggatctatcccatggggggcatctcactcatggttctcctgtcaatgtcagcggcaagtggttcaaggtcgttcattacggcgtggagcgtgatagtcagcagctcgacatggaggctgttcgtcagctggccctgaaagagcgtcctcaactgatcatctgcggctactcggcctatccccgcacgatcgattttgctgcttttcgcagcatcgctgatgaggtgggcgcttacttgttggcggacatggcacacattgccggccttgttgcggctggggtccatccgagtcctatcgcccactgtgatgtggtgacgacgaccacccacaagacattgcgtggccccagaggcggcttaatcctttgtcgtgatgcggactttggccgtaagtttgacaaggcagtgtttcctggcagtcagggcggccctttggaacatgtgattgcagccaaggctgtggccttaggagaagctcttcagccagagttccaggtttatagctgtcaggtggtggcgaatgcccaggttcttgctggtcgcattcaggagcgcgggattgcggtggtgagtggaggaacagataatcaccttgtcttgctggatttgcgcagcattgggatgaccgggaaggttgctgatttgcttgtcagtgaagtgaacatcaccgccaataagaacacagtgccctttgatcctgagtcgccttttgtgaccagtggtctgcgcttgggcacggcggccctcacaactcgtggctttgatgatgaggcattccgtgaggttgctgatgtgattgcagatcgtttgcttaaaccgcaagatgaatcgatcaaggcgcagtgcttggaacgggtgagacaactttgtggccgtttccctctctacagggatgtcctccagccagcgcttgcttga

SEQ ID NO: 9884 - protein, 429 aa, Prochlorococcus marinus str. MIT 9313
MTDRFLASINAALTDSDPAIAGLIDQERQRQETHLELIASENFTSQAVMQAQGSVLTNKYAEGLPHKRYYGGCEHVDAIEELAIERAQRLFGAAWANVQPHSGAQANFAVFLALLQPGDTIMGMDLSHGGHLTHGSPVNVSGKWFKVVHYGVERDSQQLDMEAVRQLALKERPQLIICGYSAYPRTIDFAAFRSIADEVGAYLLADMAHIAGLVAAGVHPSPIAHCDVVTTTTHKTLRGPRGGLILCRDADFGRKFDKAVFPGSQGGPLEHVIAAKAVALGEALQPEFQVYSCQVVANAQVLAGRIQERGIAVVSGGTDNHLVLLDLRSIGMTGKVADLLVSEVNITANKNTVPFDPESPFVTSGLRLGTAALTTRGFDDEAFREVADVIADRLLKPQDESIKAQCLERVRQLCGRFPLYRDVLQPALA

SEQ ID NO: 9885 - DNA, 1290 bp, Synechococcus sp. WH 8102
  CDS (1)..(1290): transl_table=11
atgagcgacagcactgcttcttcgatcaacaaaggtcttgcggccgccgatcccgccattgcagccctaattgagaaggagcagcagcgtcaggaaacccacctggagctgatcgccagcgaaaatttcgcctcccgggccgtcatggacgcccagggttcagttctgacgaacaagtacgccgaggggctccccagcaagcggtattacggcggttgtgagcacgttgatgccatcgaagagctggcgatcgaacgggccaaggaactcttcggtgcggcctgggcgaatgtgcagccccacagtggtgcccaggccaatttcgctgtcttcctggcgctgcttcagccgggagacacgatcatgggattggacctttcccatggcggtcacctgacccatggctcgccggtaaatgtgagcggaaagtggttcaacgtggtccagtacggcgtcgatcgcgagacccagcggctggacatggaggccatccggcagctggctctggagcacaagccgaagctgatcgtctgtggcttttcggcctacccccgcaccattgatttcgccgccttccgcgccattgccgatgaagtgggtgcgttcctgctcgccgatatggctcatatcgctggtctggtggcggcaggcgtgcatcccagccccgttccccactgtgatgtggtcaccaccaccacccacaagaccctgcgcggtccccgtggtggtctgatcctctgccgtgatgccgacttcgccaagaaattcgacaaggctgtgttccccggcagtcagggcggacctttggaacacgtcatcgcggccaaggcggtggccttcggcgaggccctgcaaccagcgttcaagacctatagccagcacgtggtggcgaatgcagccgctctggcagagcgtttgatcgcccgcggcatcgacgtcgtcagcggtggcaccgacaaccacgtggtgttgcttgaccttcgctctgtcggcatgaccggcaaggtggctgatctcctcgtcagtgatgtccacatcacggccaataagaacacggtgccgtttgatcccgaatcccccttcgtcaccagcggcctgcgcctgggtaccgcagcacttaccacccggggctttgatgccggtgcgttccgcgaggtggctgatgtcatcgccgaccgcctcctgaaccctgaggatgacgctgttcagcagcagtgcctgcgtcgggttgaggcgctttgccaacgcttcccgctctatgccgctgcgcgtcagccagcgcttgcctga

SEQ ID NO: 9886 - protein, 429 aa, Synechococcus sp. WH 8102
MSDSTASSINKGLAAADPAIAALIEKEQQRQETHLELIASENFASRAVMDAQGSVLTNKYAEGLPSKRYYGGCEHVDAIEELAIERAKELFGAAWANVQPHSGAQANFAVFLALLQPGDTIMGLDLSHGGHLTHGSPVNVSGKWFNVVQYGVDRETQRLDMEAIRQLALEHKPKLIVCGFSAYPRTIDFAAFRAIADEVGAFLLADMAHIAGLVAAGVHPSPVPHCDVVTTTTHKTLRGPRGGLILCRDADFAKKFDKAVFPGSQGGPLEHVIAAKAVAFGEALQPAFKTYSQHVVANAAALAERLIARGIDVVSGGTDNHVVLLDLRSVGMTGKVADLLVSDVHITANKNTVPFDPESPFVTSGLRLGTAALTTRGFDAGAFREVADVIADRLLNPEDDAVQQQCLRRVEALCQRFPLYAAARQPALA

SEQ ID NO: 9887 - DNA, 1281 bp, Porphyromonas gingivalis W83
  CDS (1)..(1281): transl_table=11
atgaaaaaagacagcgtaattttcgatctgatcgaaaaagaacatcagcgccagctcaaaggcatcgagctgatcgcatcggaaaactttgtaagcgaacaagttatgcaggctatgggtagctgtatgaccaataagtatgccgaaggttatcccggcaaacgctattacggtggttgtgaagtggtagaccaaagcgagcaaatcgccatcgaccgtatcaaacaactctacggagccgaatgggccaacgtacagcctcactccggagcacaggccaatatggccgttcttctggcttgcctcgaagcaggcgatacgttcatgggactgaacctcgaacacggcggccacctatcgcacggctcactcgtcaatagctcgggtatcctctaccgtcccatcggctacaatctgagcgaagagacgggaatggtggattacgaccacatggagaaaatggccatcgagcacaaacccaagctgatcatcggcggtggttcggcctattctcgtgagtgggactacaagcgtatgcgtgagatcgctgacaaggtgggtgccttgttgatgatcgatatggcacaccctgccggtctgatcgctgccggtctgctggagaaccccgtgaagtatgctcatatcgttacttctacgactcacaagacactgcgtggcccccgtggcggtatcatccttatgggcaaggacttcgacaatccttggggcaagaaaaccccgaagggcgagatcaagaagatgagcgcactcctcgactctgccgtattccccggtgtacagggtggtccgctcgagcacgttatagctgctaaggctgtagctttcggagaagcactggatccttcgttcaaggaataccaaacgcaggtgaaaaagaatgctgccgttttggctcaggctttcatggacaaaggctataaagtgatttccggtggtacggacaaccacagtatgctgatcgatcttcgtccgaagttccccgaactgacaggtaaagtggcagagaaagccctcgtggcagcggatattaccgtcaataagaacatggtaccgttcgattctcgctctgcattccagacatcgggcttccgcgtgggtactccggccatcaccactcgtggcgtaaaagaagataagatgggctatatcgtggagttgatagaccgtgtgctctccgcaccggaggacgaagccgtaatagcatcggttcgtaccgaagtcaaccggatgatggccgattatcctctctttgcttggtaa

SEQ ID NO: 9888 - protein, 426 aa, Porphyromonas gingivalis W83
MKKDSVIFDLIEKEHQRQLKGIELIASENFVSEQVMQAMGSCMTNKYAEGYPGKRYYGGCEVVDQSEQIAIDRIKQLYGAEWANVQPHSGAQANMAVLLACLEAGDTFMGLNLEHGGHLSHGSLVNSSGILYRPIGYNLSEETGMVDYDHMEKMAIEHKPKLIIGGGSAYSREWDYKRMREIADKVGALLMIDMAHPAGLIAAGLLENPVKYAHIVTSTTHKTLRGPRGGIILMGKDFDNPWGKKTPKGEIKKMSALLDSAVFPGVQGGPLEHVIAAKAVAFGEALDPSFKEYQTQVKKNAAVLAQAFMDKGYKVISGGTDNHSMLIDLRPKFPELTGKVAEKALVAADITVNKNMVPFDSRSAFQTSGFRVGTPAITTRGVKEDKMGYIVELIDRVLSAPEDEAVIASVRTEVNRMMADYPLFAW

SEQ ID NO: 9889 - DNA, 1251 bp, Wolinella succinogenes DSM 1740
  CDS (1)..(1251): transl_table=11
atgaattacgcactagaaaccaatgacaaagagatttttgacctcattcatgaagagcttgatcgacaaaacacccaccttgagatgattgccagcgaaaacttcacctttcctgcggtcatggaggcgatggggagcgtgctcactaataagtatgctgagggctatccctataagcgctattacggcggttgtgagtttgttgatagagtcgaagagattgcgattgagcgagccaagaagctctttggatgtggttttgccaatgttcagccccacgcggggagccaagccaatgtcgcagtctataatgctctacttaagccctacgacaaaattttgggaatggatctaagccatgggggacatctcacgcatggagccaaagtgagtgtgacgggtcagacctatcagagcttcttttatggggtggagctggatggctatatcaactatgacaaggttgaagagatcgctaaaatcgtgaaacctcagatgattgtctgcggatttagtgcctatgccagggagcttgatttcaaacgattccgagagattgccgatagcgtgggcgctctgctcttgggtgatgtggcgcatgtggcgggattgattgtggcgggtgagtatcccaatcccttcccccactgccatattgtcaccaccaccacccacaagacgcttcgaggacctaggggtgggatgattctcaccaacgacgaagagatcgccaagaagattgacaaggcggtattccctggaatgcaaggggggcctttgatgcatgtgattgcagccaaggcggtgggctttggagagaatcttaagcctgagtggaaagagtatgccaagcaggtcaaagccaatgccaaagtgctcgctaaagtgctcatggccagaggctacacgctcgtgagtggaggcacagataatcatttgattctagtctctctgctggacaaagagtttagcggcaaagatgccgacagggcactaggcgaggcaggaatcacggtcaacaaaaacaccgttcctggagagactcgaagtccttttgtgaccagcggagtgagaatcggaagcgccgcgcttaccgctaggggcatgagagagaaggagtttgagttcattgcaaccaaaattgccgatgttctagatgatgtcaataacgccgctaaacacgcggagatcaaaaaagagatcgctgagtttgccaagggattccctgtctacaccaaggctattttttaa

SEQ ID NO: 9890 - protein, 416 aa, Wolinella succinogenes DSM 1740
MNYALETNDKEIFDLIHEELDRQNTHLEMIASENFTFPAVMEAMGSVLTNKYAEGYPYKRYYGGCEFVDRVEEIAIERAKKLFGCGFANVQPHAGSQANVAVYNALLKPYDKILGMDLSHGGHLTHGAKVSVTGQTYQSFFYGVELDGYINYDKVEEIAKIVKPQMIVCGFSAYARELDFKRFREIADSVGALLLGDVAHVAGLIVAGEYPNPFPHCHIVTTTTHKTLRGPRGGMILTNDEEIAKKIDKAVFPGMQGGPLMHVIAAKAVGFGENLKPEWKEYAKQVKANAKVLAKVLMARGYTLVSGGTDNHLILVSLLDKEFSGKDADRALGEAGITVNKNTVPGETRSPFVTSGVRIGSAALTARGMREKEFEFIATKIADVLDDVNNAAKHAEIKKEIAEFAKGFPVYTKAIF

SEQ ID NO: 9891 - DNA, 1254 bp, Photorhabdus luminescens subsp. laumondii TTO1
  CDS (1)..(1254): transl_table=11
atgttaaagcgtgaaatgaatattgctagttatgatcccgaactatggcaggcgatggagcaagaagttgttcgtcaggaagaacatatcgagttaattgcttctgaaaactataccagcccaagagttatgcaggcacagggctctcaacttactaacaaatatgctgaaggttatccgggtaaacgctactacggtggttgtgaatatgtagatgttgttgaacaattagctatcgatcgtgctaaggcactgtttggtgctgattatgccaacgttcagccacattctggttctcaggcgaatgcggcagtttatatggctttgctgcaaccgggcgatacgattctggggatgaatttggcacatggtggtcatttgactcacggctctccggttaacttctctggtaagttatacaacgttgtgccttatggtatcgatgaaagcggtaaaatcgattatgacgatatcgcggcacaagctgaaaaacaccagccaaaaatgattatcggtggtttctcggcttactccggtgtggttgattgggcaaaaatgcgtgaaattgcagacagcattggtgcttacctgttcgttgatatggcacacgttgctggcctaatcgccgcaggagtgtatcctaacccggttcctcatgctcacatcgttactaccacgacgcataaaacactggcgggtccacgtggtggtttgatcttggcaaaaggtggcgacgaagagttgtataaaaaactgaactcttctgtattccctggttgtcagggggggcctctgatgcatgtgattgcaggcaaagcggtggcattgaaagaagcaatggaaccagaattcaaagcgtatcaacatcaggttgctgataacgcgaaagcgatggttgaagtgtttttggctcgtggttacaaagtggtttctggtagtacagaaaatcacttgttcctgctggatctggttgataaaaacatcactggtaaagatgccgatgctgcattgggtcgtgcaaatatcacggtaaacaaaaatagcgtacctaatgatccgaagagcccatttgtgacttctggtgtgcgtattggtacacctgcgattacccgccgtggctttaaacaagccgaagcacgtgaattggctggctggatgtgtgatgtattggacaacatcaatgatgaagtgaccattgaaatgattaagcagaaagttttggctatttgcgcaaaatatccggtttacgcataa

SEQ ID NO: 9892 - protein, 417 aa, Photorhabdus luminescens subsp. laumondii TTO1
MLKREMNIASYDPELWQAMEQEVVRQEEHIELIASENYTSPRVMQAQGSQLTNKYAEGYPGKRYYGGCEYVDVVEQLAIDRAKALFGADYANVQPHSGSQANAAVYMALLQPGDTILGMNLAHGGHLTHGSPVNFSGKLYNVVPYGIDESGKIDYDDIAAQAEKHQPKMIIGGFSAYSGVVDWAKMREIADSIGAYLFVDMAHVAGLIAAGVYPNPVPHAHIVTTTTHKTLAGPRGGLILAKGGDEELYKKLNSSVFPGCQGGPLMHVIAGKAVALKEAMEPEFKAYQHQVADNAKAMVEVFLARGYKVVSGSTENHLFLLDLVDKNITGKDADAALGRANITVNKNSVPNDPKSPFVTSGVRIGTPAITRRGFKQAEARELAGWMCDVLDNINDEVTIEMIKQKVLAICAKYPVYA

SEQ ID NO: 9893 - DNA, 1251 bp, Onion yellows phytoplasma OY-M
  CDS (1)..(1251): transl_table=11
atgaatcaaaagttaggattaaaagaccaagatcaagaaatctttgatcttattgaacaagaaaaaattagacaaaaagaaaatatcttattaattgcttcggaaaattttgtttctcaagcagtattagatgcccaaggaagcattttgactaacaaatatgcagaaggttatcctcaagctagatattataatggttgtaaaaatgtagatcaaatagaaaaaattgccattcaaagagcaaccaagctgtttggtgctaaatatgcaaacgtccaacctcattcaggttcacaagccaatatgggagcatttcaagccttattaaaacctggtgacaaaattttaggattatctttaatggatggaggacatcttactcacggtcataaattaagtttttctggtggtttttatgaagctcatttttataatgtccatccccaaactgaaatgcttgattatgatgaaattcgtaaagttgccttaaaagttaaacctaaattaattattgcaggatattcggcttattctaaaactattaattttaaaaagtttcgtcaaattgctgatgaagttaatgcctatttaatggcagatattgcccatattgcaggtttagttgcttgtgggcttcatccttgtccctttgaagctaacgccgatgttgttacttctactatgcacaaaacactgagaggaccgcgtggaggtttgattttaaccaataaagaagaagtatttaaaaaaataaatcgtggtatttttccaggtattcaaggaggaccttgtattcatactattgcagctaaagctgttgcttttcaagaagcgatgatgccttcttttaaagaatatcaaaagcaagttatcaaaaatgcaaacacctttgctaaagccttccaacaaaaaggttatcgcattgtaagtggaggcactgataatcatttatttttaattgatgttaaacataaaaatcctgagtttacaggatccaaaattgcaaacatgttagaaaaaataaatattgttgtcaacaaaaataccattccttttgatcaagaaaaaccttttgtgacaagcggtattagaattggcacacctgctatgacaacagtaggttttagagaaaatgattttattttagttgcagatttgatggacaaagctatcaatcacttggacgacgaatcttatttagcccaaattaaacaacaagttttggctttattaagtaaatttaataagtaa

SEQ ID NO: 9894 - protein, 416 aa, Onion yellows phytoplasma OY-M
MNQKLGLKDQDQEIFDLIEQEKIRQKENILLIASENFVSQAVLDAQGSILTNKYAEGYPQARYYNGCKNVDQIEKIAIQRATKLFGAKYANVQPHSGSQANMGAFQALLKPGDKILGLSLMDGGHLTHGHKLSFSGGFYEAHFYNVHPQTEMLDYDEIRKVALKVKPKLIIAGYSAYSKTINFKKFRQIADEVNAYLMADIAHIAGLVACGLHPCPFEANADVVTSTMHKTLRGPRGGLILTNKEEVFKKINRGIFPGIQGGPCIHTIAAKAVAFQEAMMPSFKEYQKQVIKNANTFAKAFQQKGYRIVSGGTDNHLFLIDVKHKNPEFTGSKIANMLEKINIVVNKNTIPFDQEKPFVTSGIRIGTPAMTTVGFRENDFILVADLMDKAINHLDDESYLAQIKQQVLALLSKFNK

SEQ ID NO: 9895 - DNA, 1248 bp, Geobacter sulfurreducens PCA
  CDS (1)..(1248): transl_table=11
atgtcgattctcgaaacctttgacccgcaggtagctgaggcgatccgccatgaaaccgaacggcaggagtacaacctggagttgatcgcttccgaaaactttgtttccgaggcggtactggaagcccagggctcggtgatgaccaataagtatgccgagggataccccggtaagcgctactatggtggatgccaccatgtggacgtggtggaaaatctcgctattgagcgggccaaggagcttttcggtgccgatcatgccaacgtccagccccattcgggctcccaggcaaatatggcggtctatttttcggtgctcaagcccggcgacaccattcttgggatgaatctgtcccacggcggccacctgacccacggcagccccgtgaacttctccggccgtttcttcaacgtggttccctacggcgtgtcccaggagaccgaaacgatcgacttcaatgaggtggagcgtcttgcccttgagcataagccgaagatgatagttgtgggggcaagcgcctatccccgaaccatcgattttgccgccttccgcatcattgccgataaggtcggcgcggttatcatggttgatatggctcacattgcgggcctggttgcggccggtctccatccgagccctgttccctacgctgaattcgtgaccaccactacccataagaccctcagaggtccccgcggcgggatgatcctgtgccgtgaggagtacgccaagacgctcaattccaacatcttccccggtatccagggggggccgctcatgcatgtcatcgcggccaaggccgttgccctcaaggaggccctccagcccgagttcaaagcgtatcaggcccagatcgtgaaaaatgccaaggcccttgccgacgagctggtaaagcgcgggttccggcttgtgtccggcggcaccgataaccatctgatgctggttaacctaaccggcaccgaactgaccggcaaggtggcggaagagtctctggataaggccggcatcacggtgaacaagaacacggtgcctttcgagacccgttcaccctttgtcacctccggtttccggatcggcactcccgcagccactacccacggtctcaaggaagctgaaatggccgacgtggcgggctttatcgcagaggccctggccaacgtggacaatgatgccaaactcgccgagattaaggggagggtcaatgtgcttatgaaacgcttccccctctatgctcaccgtctttcataa

SEQ ID NO: 9896 - protein, 415 aa, Geobacter sulfurreducens PCA
MSILETFDPQVAEAIRHETERQEYNLELIASENFVSEAVLEAQGSVMTNKYAEGYPGKRYYGGCHHVDVVENLAIERAKELFGADHANVQPHSGSQANMAVYFSVLKPGDTILGMNLSHGGHLTHGSPVNFSGRFFNVVPYGVSQETETIDFNEVERLALEHKPKMIVVGASAYPRTIDFAAFRIIADKVGAVIMVDMAHIAGLVAAGLHPSPVPYAEFVTTTTHKTLRGPRGGMILCREEYAKTLNSNIFPGIQGGPLMHVIAAKAVALKEALQPEFKAYQAQIVKNAKALADELVKRGFRLVSGGTDNHLMLVNLTGTELTGKVAEESLDKAGITVNKNTVPFETRSPFVTSGFRIGTPAATTHGLKEAEMADVAGFIAEALANVDNDAKLAEIKGRVNVLMKRFPLYAHRLS

SEQ ID NO: 9897 - DNA, 1248 bp, Bdellovibrio bacteriovorus HD100
  CDS (1)..(1248): transl_table=11
atgcattcaacttcactcagcttagcccaagtggatccggaaattctggccgccatcaacaaagaatctgaacgtcagcagttcggactggaaatgatcgcttctgagaactacacctccaaagctgtgatggaagctcagggctctatcctgaccaacaagtacgctgaaggctatccaggcaaacgctactatggcggctgcgtaaacgtggacacagttgaatccctggcgattgaaagagcaaagaaacttttcggcgttcagtatgccaacgtccagccacactctggatcccaggccaacatgggtgtttacctggcggcctgcaaagcgggtgaaactatcttgggcatggatctttctcacggcgggcatctgactcacgggtctccggtgaatttcagcgggatgctgttcaaagcagcttcgtacaagctggatccggaaacaggtcgtttgaattatgatacaatccgcgctacagcgaaagaggttcagccgaaactgatcattgcgggttacagtgcttatccgcgcaccttggactttgcaaaattcaaagagatcgcagacgaagtcggcgctcaactgctggtggacatggctcactttgcaggtcttgtggcaacaggccatcacccgtccccggttccttatgctgactacatcaccacgaccacacacaaaaccttgcgcggtcctcgtggcggcatgatcctgacgaactcagaagaaaaagccaagaccatgaactcccgcatcttccctggtatccagggtggaccgttggagcacgtgattgcgggtaaagccgtggccttcggcgaagctcttaaaccagagtttaaagattattccggcaaagtggttagcaacgcaaaagttctggcagaagagcttttgtctgcaggcttcaagcttgtgaccggcggcactgacaaccatttgatcctggtggatctgagcgatcgagaaatcacggggaagctggcagaaaattctttggatgaagctggcatcactgtgaataaaaacactgtgccaaatgaaaagcgctctccatttgtcacaagtggtgttcgcatcggaactcccgctttgaccacacgtggaatgggtccagcggaaatgaagcaaattgcgaaatggatcggccaagttctgaataacgctgaagatgctggtgtgaaaaaccgcgtgcatgaagaagtaaaagagctttgcaagcagttcccgatttactaa

SEQ ID NO: 9898 - protein, 415 aa, Bdellovibrio bacteriovorus HD100
MHSTSLSLAQVDPEILAAINKESERQQFGLEMIASENYTSKAVMEAQGSILTNKYAEGYPGKRYYGGCVNVDTVESLAIERAKKLFGVQYANVQPHSGSQANMGVYLAACKAGETILGMDLSHGGHLTHGSPVNFSGMLFKAASYKLDPETGRLNYDTIRATAKEVQPKLIIAGYSAYPRTLDFAKFKEIADEVGAQLLVDMAHFAGLVATGHHPSPVPYADYITTTTHKTLRGPRGGMILTNSEEKAKTMNSRIFPGIQGGPLEHVIAGKAVAFGEALKPEFKDYSGKVVSNAKVLAEELLSAGFKLVTGGTDNHLILVDLSDREITGKLAENSLDEAGITVNKNTVPNEKRSPFVTSGVRIGTPALTTRGMGPAEMKQIAKWIGQVLNNAEDAGVKNRVHEEVKELCKQFPIY

SEQ ID NO: 9899 - DNA, 1410 bp, Ashbya gossypii ATCC 10895
  CDS (1)..(1410)
atgccataccacctatccgaatcgcacaagaagctcatctcctcgcacctgagcgagagcgacccagaggtggacgcgatcatcaaggatgaaattgacaggcaaaagcactcgattgtgctgattgcgtcggagaacttgacgtcgaccgccgtgttcgacgcgctaggaacgccgatgtgcaacaagtactcggagggctaccccggcgcgcgctactacggcgggaaccagcacatcgaccgcatggagctgctgtgccagcgccgcgcgctggaggcgttccacgtgacgccggaccgctggggcgtcaacgtgcagtcgctgtccgggtcgcccgcgaacctgcaggtgtaccaggcgctgatgaagccgcacgagcggctgatgggtctgcacctgcccgacggcgggcacctgtcgcacggctaccagacggagacgcgcaagatctccgcggtatcgacgtacttcgagtcgttcccgtaccgcgtggacccggagaccggcatcatcgactatgacacgctcgagaagaacgcggtgctgtaccggcccaagatccttgtggcgggcacctccgcgtactgccggctgatcgactacaagcggatgcgcgagatcgccgacaaggtcggtgcgtacctgatggtcgacatggcgcacatctcggggctggtcgccgcaggcgtcatcccctcgcccttcgagtacgccgacatcgtcaccaccaccacccacaagtcgctcagaggcccacggggagccatgatcttcttcaggagaggcgtgcgctccgtgcacccaaagaccggcgaggaggtaatgtacgacctcgagggccctatcaacttctccgtcttccccggccaccagggcggcccccacaaccacaccatctccgccctggccaccgcgctcaagcaggcgacgacccccgagttcagggagtaccaggagctcgtgttgaagaacgccaaggtcctggagaccgagttcaaaaagctcaactaccgcctcgtctccgacggcaccgactcccacatggtcctcgtctccttgcgcgagaagggcgtcgacggcgcccgcgtcgagcacgtctgcgagaagatcaacatcgccctcaacaagaactccatcccaggcgacaagtccgcgctcgtgcccggcggcgtccgcatcggcgcccccgccatgaccaccaggggcatgggcgaggaggacttcgcccgcatcgtcggctacatcaaccgtgctgtcgagatcgcccgttccatccagcagtcgctgcccaaggaggccaacaggctcaaggacttcaaggccaaggtcgagggcggcaccgacgagatagcacagctcgcccaggagatctacagctggactgaggagtaccctctgcctgtctaa

SEQ ID NO: 9900 - protein, 469 aa, Ashbya gossypii ATCC 10895
MPYHLSESHKKLISSHLSESDPEVDAIIKDEIDRQKHSIVLIASENLTSTAVFDALGTPMCNKYSEGYPGARYYGGNQHIDRMELLCQRRALEAFHVTPDRWGVNVQSLSGSPANLQVYQALMKPHERLMGLHLPDGGHLSHGYQTETRKISAVSTYFESFPYRVDPETGIIDYDTLEKNAVLYRPKILVAGTSAYCRLIDYKRMREIADKVGAYLMVDMAHISGLVAAGVIPSPFEYADIVTTTTHKSLRGPRGAMIFFRRGVRSVHPKTGEEVMYDLEGPINFSVFPGHQGGPHNHTISALATALKQATTPEFREYQELVLKNAKVLETEFKKLNYRLVSDGTDSHMVLVSLREKGVDGARVEHVCEKINIALNKNSIPGDKSALVPGGVRIGAPAMTTRGMGEEDFARIVGYINRAVEIARSIQQSLPKEANRLKDFKAKVEGGTDEIAQLAQEIYSWTEEYPLPV

SEQ ID NO: 9901 - DNA, 1443 bp, Strongylocentrotus purpuratus
  CDS (1)..(1443)
atggctactgttaacggaaccaagacagtgatcaagacagcgatgaatggtgatgggagtctaaagacagtcaccaatggcaatggtgatgggagtctcaagaaagttagcaatggcaatggcgatgggagtctcaagacagtcactaatagtgatgggagtccttggtttggacaccagtcgttggaagagaatgacccggagatgtatgctatcatcttaaaggagaaggatcgtcaaaggaaaggcttagaactgattgcatcagagaacttcccaagcagggctgttctagaggctctcggctcctgtctgcaaaataaatactgcgagggataccctggaaatagatactatggcggtacgcagttctttgatgaaatggaacttctgactcagaagagagccttagcagcatttggtttgaaggaggaggaatggggcgtcaatgtccagccgtattcaggctctccagcaaactttgccgtctacactggagtgattggcccccatggtcgtatcatgggtctggatctaccggacggtggtcaccttacacatggattcatgacggctaagaagaagatctctgcaacgtccttgttctttgagtcaatgccttacagggtgaatcctaaaacaggcctcattgattatgaagctctagctgtaaacgccagattgttccgtccacaaatgatcattgcaggtatgagctgttatcctaggaatctagactacaaacgtttcaaggagatagcagtagagaatgatgcttatcttctagctgatatggctcacgtgagtggattagttgctgctggagttgtagctaatccttttgagtactgtgacatcgttacaagcacaacacacaagacacttagaggacctcgatcaggcatcatcttcttccgtagaggcgttggtgtagccttattgcaggcttcacaaccggagtttaagctgtatgcccgggatgtcgtcacaaacgcacaagccatggctgaagaacttatgaagagaggttatactatttcttcaggtggaacggacactcatcttctactccttgacctccgacccctgggactggatggagctcgtggagagttcgtgcttgagcgtgtaggaatcgttctcaataagaacacatgtcctggggacaagagcgcactcaagcctggcggtctaaggatcggtacaccagctctcacgtcaagaaacttcaaggttactgatttcatgatggtggttgactacattgatagaggtctgaagttgactgcagaggcaaacaagaagtgttcaagtacaacccttcgtgacttcaaggcttacgtcacaagtgattcagacttccaatccaaacttgctgcccttgaaaaggaggtcgaatcttttgctgtaaggttcccattacctggtcatgaagttctgtaa

SEQ ID NO: 9902 - protein, 480 aa, Strongylocentrotus purpuratus
MATVNGTKTVIKTAMNGDGSLKTVTNGNGDGSLKKVSNGNGDGSLKTVTNSDGSPWFGHQSLEENDPEMYAIILKEKDRQRKGLELIASENFPSRAVLEALGSCLQNKYCEGYPGNRYYGGTQFFDEMELLTQKRALAAFGLKEEEWGVNVQPYSGSPANFAVYTGVIGPHGRIMGLDLPDGGHLTHGFMTAKKKISATSLFFESMPYRVNPKTGLIDYEALAVNARLFRPQMIIAGMSCYPRNLDYKRFKEIAVENDAYLLADMAHVSGLVAAGVVANPFEYCDIVTSTTHKTLRGPRSGIIFFRRGVGVALLQASQPEFKLYARDVVTNAQAMAEELMKRGYTISSGGTDTHLLLLDLRPLGLDGARGEFVLERVGIVLNKNTCPGDKSALKPGGLRIGTPALTSRNFKVTDFMMVVDYIDRGLKLTAEANKKCSSTTLRDFKAYVTSDSDFQSKLAALEKEVESFAVRFPLPGHEVL

SEQ ID NO: 9903 - DNA, 1491 bp, Strongylocentrotus purpuratus
  CDS (1)..(1491)
atggagtcgccagtagaaaagaaggcaaagctgaataacggagacgaaatggctactgttaacggaaccaagacagtgatcaagacagcgatgaatggtgatgggagtctaaagacagtcaccaatggcaatggtgatgggagtctcaagaaagttagcaatggcaatggcgatgggagtctcaagacagtcactaatagtgatgggagtccttggtttggacaccagtcgttggaagagaatgacccggagatgtatgctatcatcttaaaggagaaggatcgtcaaaggaaaggcttagaactgattgcatcagagaacttcccaagcagggctgttctagaggctctcggctcctgtctgcaaaataaatactgcgagggataccctggaaatagatactatggcggtacgcagttctttgatgaaatggaacttctgactcagaagagagccttagcagcatttggtttgaaggaggaggaatggggcgtcaatgtccagccgtattcaggctctccagcaaactttgccgtctacactggagtgattggcccccatggtcgtatcatgggtctggatctaccggacggtggtcaccttacacatggattcatgacggctaagaagaagatctctgcaacgtccttgttctttgagtcaatgccttacagggtgaatcctaaaacaggcctcattgattatgaagctctagctgtaaacgccagattgttccgtccacaaatgatcattgcaggtatgagctgttatcctaggaatctagactacaaacgtttcaaggagatagcagtagagaatgatgcttatcttctagctgatatggctcacgtgagtggattagttgctgctggagttgtagctaatccttttgagtactgtgacatcgttacaagcacaacacacaagacacttagaggacctcgatcaggcatcatcttcttccgtagaggcgttggtgtagccttattgcaggcttcacaaccggagtttaagctgtatgcccgggatgtcgtcacaaacgcacaagccatggctgaagaacttatgaagagaggttatactatttcttcaggtggaacggacactcatcttctactccttgacctccgacccctgggactggatggagctcgtggagagttcgtgcttgagcgtgtaggaatcgttctcaataagaacacatgtcctggggacaagagcgcactcaagcctggcggtctaaggatcggtacaccagctctcacgtcaagaaacttcaaggttactgatttcatgatggtggttgactacattgatagaggtctgaagttgactgcagaggcaaacaagaagtgttcaagtacaacccttcgtgacttcaaggcttacgtcacaagtgattcagacttccaatccaaacttgctgcccttgaaaaggaggtcgaatcttttgctgtaaggttcccattacctggtcatgaagttctgtaa

SEQ ID NO: 9904 - protein, 496 aa, Strongylocentrotus purpuratus
MESPVEKKAKLNNGDEMATVNGTKTVIKTAMNGDGSLKTVTNGNGDGSLKKVSNGNGDGSLKTVTNSDGSPWFGHQSLEENDPEMYAIILKEKDRQRKGLELIASENFPSRAVLEALGSCLQNKYCEGYPGNRYYGGTQFFDEMELLTQKRALAAFGLKEEEWGVNVQPYSGSPANFAVYTGVIGPHGRIMGLDLPDGGHLTHGFMTAKKKISATSLFFESMPYRVNPKTGLIDYEALAVNARLFRPQMIIAGMSCYPRNLDYKRFKEIAVENDAYLLADMAHVSGLVAAGVVANPFEYCDIVTSTTHKTLRGPRSGIIFFRRGVGVALLQASQPEFKLYARDVVTNAQAMAEELMKRGYTISSGGTDTHLLLLDLRPLGLDGARGEFVLERVGIVLNKNTCPGDKSALKPGGLRIGTPALTSRNFKVTDFMMVVDYIDRGLKLTAEANKKCSSTTLRDFKAYVTSDSDFQSKLAALEKEVESFAVRFPLPGHEVL

SEQ ID NO: 9905 - DNA, 1605 bp, Strongylocentrotus purpuratus
  CDS (1)..(1605)
atggagtcgccagtagaaaagaaggcaaagctgaataacggagacgaaatggctactgttaacggaaccaagacagtgatcaagacagcgatgaatggtgatgggagtctaaagacagtcaccaatggcaatggtgatgggagtctcaagaaagttagcaatggcaatggcgatgggagtctcaagacagtcactaatagtgatgggagtccttggtttggacaccagtcgttggaagagaatgacccggagatgtatgctatcatcttaaaggagaaggatcgtcaaaggaaaggcttagaactgattgcatcagagaacttcccaagcagggctgttctagaggctctcggctcctgtctgcaaaataaatactgcgagggataccctggaaatagatactatggcggtacgcagttctttgatgaaatggaacttctgactcagaagagagccttagcagcatttggtttgaaggaggaggaatggggcgtcaatgtccagccgtattcaggctctccagcaaactttgccgtctacactggagtgattggcccccatggtcgtatcatgggtctggatctaccggacggtggtcaccttacacatggattcatgacggctaagaagaagatctctgcaacgtccttgttctttgagtcaatgccttacagggtgaatcctaaaacaggcctcattgattatgaagctctagctgtaaacgccagattgttccgtccacaaatgatcattgcaggtatgagctgttatcctaggaatctagactacaaacgtttcaaggagatagcagtagagaatgatgcttatcttctagctgatatggctcacgtgagtggattagttgctgctggagttgtagctaatccttttgagtactgtgacatcgttacaagcacaacacacaagacacttagaggacctcgatcaggcatcatcttcttccgtagaggtgtccgtaaggttctcaagaatggcactgaggtgatgtatgaccttgagaaaccgatcaacgaagccgtcttccctggtcttcaaggtggaccccatatgcatgctgtaggaggcgttggtgtagccttattgcaggcttcacaaccggagtttaagctgtatgcccgggatgtcgtcacaaacgcacaagccatggctgaagaacttatgaagagaggttatactatttcttcaggtggaacggacactcatcttctactccttgacctccgacccctgggactggatggagctcgtggagagttcgtgcttgagcgtgtaggaatcgttctcaataagaacacatgtcctggggacaagagcgcactcaagcctggcggtctaaggatcggtacaccagctctcacgtcaagaaacttcaaggttactgatttcatgatggtggttgactacattgatagaggtctgaagttgactgcagaggcaaacaagaagtgttcaagtacaacccttcgtgacttcaaggcttacgtcacaagtgattcagacttccaatccaaacttgctgcccttgaaaaggaggtcgaatcttttgctgtaaggttcccattacctggtcatgaagttctgtaa

SEQ ID NO: 9906 - protein, 534 aa, Strongylocentrotus purpuratus
MESPVEKKAKLNNGDEMATVNGTKTVIKTAMNGDGSLKTVTNGNGDGSLKKVSNGNGDGSLKTVTNSDGSPWFGHQSLEENDPEMYAIILKEKDRQRKGLELIASENFPSRAVLEALGSCLQNKYCEGYPGNRYYGGTQFFDEMELLTQKRALAAFGLKEEEWGVNVQPYSGSPANFAVYTGVIGPHGRIMGLDLPDGGHLTHGFMTAKKKISATSLFFESMPYRVNPKTGLIDYEALAVNARLFRPQMIIAGMSCYPRNLDYKRFKEIAVENDAYLLADMAHVSGLVAAGVVANPFEYCDIVTSTTHKTLRGPRSGIIFFRRGVRKVLKNGTEVMYDLEKPINEAVFPGLQGGPHMHAVGGVGVALLQASQPEFKLYARDVVTNAQAMAEELMKRGYTISSGGTDTHLLLLDLRPLGLDGARGEFVLERVGIVLNKNTCPGDKSALKPGGLRIGTPALTSRNFKVTDFMMVVDYIDRGLKLTAEANKKCSSTTLRDFKAYVTSDSDFQSKLAALEKEVESFAVRFPLPGHEVL

SEQ ID NO: 9907 - DNA, 1644 bp, Aspergillus terreus NIH2624
  CDS (1)..(1644)
atgctcagccgttgcggtcgtcccgtctcccgcgtgctcccgcgtgtcggaagctctcccggagctatcgccctctcctcccgcatccagctcccctccattccccaatcccgcggccttgaatatgcgctgaccgttctcgcacagctcctctccgctcatctgaaggaggaggaccccacgatctacaacattctccaaaatgagaaaaaacgtcagaagcatttcatcaacctcattccctccgagaacttcacctcccaggccgtcctcgatgccctcggcagtgtgatgcaaaataagtactctgaaggataccccggagccagatactacggtggaaacgagtacatcgacgagtcggagcgtctctgccagcagcgcgcgctcgagactttccgtctcaaccccgaagagtggggtgtcaatgtccagcccctctccggttctcccgccaacctctatgccatctccgccctcctcaacacccatgaccgtctcatgggtctggatctcccccacggtggccatctgtcgcacggctaccagacccccaccaagaagatctccttcatctccaagtacttcgagaccttcccctaccgtctcgacgagtccaccggtcttatcgactacgacgccctggagaagaatgctctcctctaccgtcccaagctcatcatcgccggtacctccgcctacagtcgtctgatcgattacccccgtatgcgccagatcgccgacgccgctggcgcctacctcctcagcgacatggcccacatctccggtctcgtggccgccggcgttcttccctcacccttcaaccactccgacgtggtgactaccaccacccacaagtctctgcgcggaccccgtggcgccatgatcttctaccgcaagggtgtccgccggacggacaagaagggtaaccccgagatgtacgatctggagggccccatcaacgcctccgtcttcccgggccaccagggtggcccccacaaccacaccatcaccgcgctggccgtcgccctgaagcaggcccagtcgaccgagttcaagacctaccaggagaccgtcctggccaacgcgcaggccctcgccgaacgcctgggcagccccctcagcagtggcggtctgggatacaacatcgtctccggcggcaccgacaaccacctcgtgctggtggacctgaagaaccgcggtgtggacggtgctcgcgtcgagcgcgtgctcgagctgtgcggcgtcgccagcaacaagaacaccgtgcccggggacaagtccgcactcaagcccggcggtctgcgtctgggtacccccgccatgaccacccgtggcttccagcccgaagacttccgccgggtggcggacattgtcgatcgcgccgtcatcatcacccagaagctggacaaggccgccaaggagagcgccgccgccaagggcgtcaagaaccccaacaccgtcaaggccttcctcgactacgtcggcgagggcgaggagatctccgatatcgtcctcttgagacaggaggtcgaggactgggtgggttctgtcatgttcgggcgttatggccattttatgaatatgaggatctacccatgtggcaaagtccccatggtctttcgctgtgtttgggccttttag

SEQ ID NO: 9908 - protein, 547 aa, Aspergillus terreus NIH2624
MLSRCGRPVSRVLPRVGSSPGAIALSSRIQLPSIPQSRGLEYALTVLAQLLSAHLKEEDPTIYNILQNEKKRQKHFINLIPSENFTSQAVLDALGSVMQNKYSEGYPGARYYGGNEYIDESERLCQQRALETFRLNPEEWGVNVQPLSGSPANLYAISALLNTHDRLMGLDLPHGGHLSHGYQTPTKKISFISKYFETFPYRLDESTGLIDYDALEKNALLYRPKLIIAGTSAYSRLIDYPRMRQIADAAGAYLLSDMAHISGLVAAGVLPSPFNHSDVVTTTTHKSLRGPRGAMIFYRKGVRRTDKKGNPEMYDLEGPINASVFPGHQGGPHNHTITALAVALKQAQSTEFKTYQETVLANAQALAERLGSPLSSGGLGYNIVSGGTDNHLVLVDLKNRGVDGARVERVLELCGVASNKNTVPGDKSALKPGGLRLGTPAMTTRGFQPEDFRRVADIVDRAVIITQKLDKAAKESAAAKGVKNPNTVKAFLDYVGEGEEISDIVLLRQEVEDWVGSVMFGRYGHFMNMRIYPCGKVPMVFRCVWAF

SEQ ID NO: 9909 - DNA, 1428 bp, Chaetomium globosum CBS 148.51
  CDS (1)..(1428)
atggcgacctatgcgctccccgagtcgcacaagcagatgcttgagaagtctctgcttgactccgaccccgagaaacatgagattcagcggcaacgcgagtccatcatcctcatcgcctccgaaaatgtcacgtctcgtgccgtcttcgatgctcttggctcccccatgtccaacaagtactctgagggttaccccggcgctcggtactatggtggcaaccagcacattgacgagatcgagcttctttgccagaagcgtgccctcgaggccttcaacgtcgatggtgccaagtggggcgtcaacgtccagtgcttgagtggcagccctgccaaccttcaggtttaccaggccatcatgcctccccacggaaggctgatgggcctggacctcccccacggtggccatctcagccacggctaccaaactccccagcggaagatctccgctgtctcgacctacttcgagaccatgccctaccgggtcgacctcgagaccggcatcatcgactacgacatgctcgagaagaatgcccagctcttccgccccaagattctcgttgccggtacctcggcctactgccgtctgattgactaccagcgcatgcgcaagattgctgactcggttggcgcctacctggttgtcgacattgcccacatctccggcctggtttcctccggcgtcatcccgtcgcccttcgactacgctgatgtcgtcaccaccaccacccacaagtccctccgtggcccccgtggtgccatgatcttcttccgcaagggtgtccgctctgtcgatgccaagaccggcaaggagacactctatgatctggaggacaagatcaacttctccgtcttccctggacaccagggtggcccccacaaccacaccatcaccgcccttgccgtcgcgctcaagcaggctgccacccctgagtttaaggagtaccagaagaaggtggtcgccaacgccaaggctctcgagaacaagttcaaggagcttggccacaagctcgtctccgacggcaccgactcgcacatggtcctcgtcgacctccgccccttgtcccttgatggcgctcgcgtggaggccgtccttgagcagatcaacatcgcctgcaacaagaacagcgttcccggcgacaagagcgccctcacccccggcggtctgcgtatcggcaccccggccatgaccagccgtggtttcggcgaggccgacttcgagcgcgttgcttcctacatcgacgctagcatcaagctctgcaaggagatccagggcgccctgcccaaggaggccaacaagctcaaggacttccggttcaagattgctagcggcgaggttgcccgcatcaacgagctcaagaaggagatctcggactggtgccacaccttccccctccccgttgagggctggcgtatggacgccggcatctaa

SEQ ID NO: 9910 - protein, 475 aa, Chaetomium globosum CBS 148.51
MATYALPESHKQMLEKSLLDSDPEKHEIQRQRESIILIASENVTSRAVFDALGSPMSNKYSEGYPGARYYGGNQHIDEIELLCQKRALEAFNVDGAKWGVNVQCLSGSPANLQVYQAIMPPHGRLMGLDLPHGGHLSHGYQTPQRKISAVSTYFETMPYRVDLETGIIDYDMLEKNAQLFRPKILVAGTSAYCRLIDYQRMRKIADSVGAYLVVDIAHISGLVSSGVIPSPFDYADVVTTTTHKSLRGPRGAMIFFRKGVRSVDAKTGKETLYDLEDKINFSVFPGHQGGPHNHTITALAVALKQAATPEFKEYQKKVVANAKALENKFKELGHKLVSDGTDSHMVLVDLRPLSLDGARVEAVLEQINIACNKNSVPGDKSALTPGGLRIGTPAMTSRGFGEADFERVASYIDASIKLCKEIQGALPKEANKLKDFRFKIASGEVARINELKKEISDWCHTFPLPVEGWRMDAGI

SEQ ID NO: 9911 - DNA, 1587 bp, Coccidioides immitis RS
  CDS (1)..(1587)
atgtcggtcaatcgctgcggccgccaagctgcaaagctgctccggttatctggcgggtattcgagagtggcctgtgggctcagatggagtcatcccgcaagacgagttgctcaatggcagagcgttgcgtctgtccacactgatggccatcagaatatgctagcggagaaactcgagcaagctgatccaactgtttataagattatccagaatgaaaaaagcaggcagaaacattttatcaacctgatcccctcagagaacttcacctcccaggctgtcctcgatgcgcttggcagtgtgatgcaaaataaatattctgagggataccccggtgctcggtactacggtgggaacgaattcattgaccaagctgagcgcctctgccagcagcgcgctctgcaggcatttgggttgaacccagaagagtggggagtgaacgtccaacccctatctggatctcccgccaacttctacgcatattccgccgtcctccagccccacgatcgccttatgggcttggacctccctcacggaggtcacctttctcatggctaccaaactcccacgaaaaagatctccgcagtgtctaagtacttcgagacgcttccttatcgtctagatgaatctactggtctcatagattatgccaaactggaggatttggccacattgtaccgaccaaaactcattgttgcaggaacatccgcatacagcaggctgattgattatccccgcatgaaaaagattgctgacagcgttggagcatatctgctcagtgacatggcccatatttctgggttggttgctgctggcgtcattccatcgccattcccacagtcagatatcgtcacaactacgacacacaaatcgctccgagggccacgcggcgccatgatcttctaccggaagggtgtccgtaaacacgatgctaaaggaaatcctatcatgtatgatttggaaaaccccatcaatgccgccgtgttccctggccaccaaggtgggccccacaaccacacaattaccgcccttgccgttgctttgaaacaagcccacagcccagaattcaaaacataccagcaaagtgtattggaaaacgcaaaggccttggcagcccgcctcggtaactctacaaatagcggtggcttgggctacaatatcgtgtctggtggtaccgataaccatcttgttctcgtcgacctgaagaaccgtggcgtcgatggtgcacgcgtggagagagttctcgagctctgtggtgtggcaagtaacaagaacaccgtgccaggtgataagtctgcaatgaagcccggtggtctccgaatgggcacaccggccatgacttcccgtggctttggaccggaggacttctctcgcgttgctgatattgttgaccgcgctgtcatcatcacgcagaagcttgacaaagccgccagagctgaagcggaggccaagaatcggaagaaccccacgagcttgaaggcattcttcgaatacctcggacaaggagaggaggtttcggagattgtacaattaagaaaagaggttgaggactgggtgggaacattcagccttccgtggactgaggaatag

SEQ ID NO: 9912 - protein, 528 aa, Coccidioides immitis RS
MSVNRCGRQAAKLLRLSGGYSRVACGLRWSHPARRVAQWQSVASVHTDGHQNMLAEKLEQADPTVYKIIQNEKSRQKHFINLIPSENFTSQAVLDALGSVMQNKYSEGYPGARYYGGNEFIDQAERLCQQRALQAFGLNPEEWGVNVQPLSGSPANFYAYSAVLQPHDRLMGLDLPHGGHLSHGYQTPTKKISAVSKYFETLPYRLDESTGLIDYAKLEDLATLYRPKLIVAGTSAYSRLIDYPRMKKIADSVGAYLLSDMAHISGLVAAGVIPSPFPQSDIVTTTTHKSLRGPRGAMIFYRKGVRKHDAKGNPIMYDLENPINAAVFPGHQGGPHNHTITALAVALKQAHSPEFKTYQQSVLENAKALAARLGNSTNSGGLGYNIVSGGTDNHLVLVDLKNRGVDGARVERVLELCGVASNKNTVPGDKSAMKPGGLRMGTPAMTSRGFGPEDFSRVADIVDRAVIITQKLDKAARAEAEAKNRKNPTSLKAFFEYLGQGEEVSEIVQLRKEVEDWVGTFSLPWTEE

SEQ ID NO: 9913 - DNA, 1614 bp, Neosartorya fischeri NRRL 181
  CDS (1)..(1614)
atgtctctgagtcgttgcggacgacaggcctcgcgcctcatcccgcggtctggaagctcttccagagctaccactgctatcaccaccgcccgccgtccgggcttccagcttcagactcccactgctgcatccaggaatgtgcaatggcgaagcgtatcctcatccagccgcgatggccagcaacatttgctctccgcatccctcgaggaggaagatcccactgtctacaacattctgcaaaaggagaaaaaacgccaaaagcatttcatcaacctcatcccctccgagaactttacgtcacaggccgttctcgatgcgctggggagtgtgatgcaaaacaaatattccgaaggataccccggtgcaagatactatggaggaaacgagttcatcgacgagtccgagagactgtgccagcagcgtgccctcgagacctttagactccaccccgaggaatggggtgtcaacgtacagcctctctccggttctcccgctaacctttatgccatatccgccgtcctcaacacacacgaccgtctgatgggcttggatctgccccatggtggccacctgtcgcacggttaccaaacccccaccaagaagatctctttcatctccaagtacttcgagaccctgccttaccgcctggatgaatccaccggcctcattgactacgatggagcggagaagctggctctgctctaccgacccaagctgatcatcgccggcacttcggcctacagccggcttatcgactacccccgcatgcgccagatcgctgacgccgctggtgcgtacctgctgagcgatatggcccacatttcgggcttagtagccgccggcgtgctgccttcgcccttccctcactccgacattgtgacaactacaacccacaagtctttgcgcggtcctcgcggtgccatgatcttctaccgcaagggcgtccgccggacagacaagaagggcaacaaggagatgtacgatctcgagaacctcatcaacgcgtcggttttccctggtcaccagggtggtcctcacaaccacaccatcaccgcgctgtccgtcgccttgaagcaggctcaaacgccagaattcaaggcctaccaggaaaccgttttggccaatgccaaggcgctgtcggaaagactgggtggcccaatcaacaatggcggtctcggctacaacatcgtgtcgggaggcaccgacaatcacctggtccttgtcgacctgaagaatcgcggcgtcgacggtgcccgtgtcgagcgtgtcctcgagctctgtggcgtcgccagcaacaagaacactgtccctggcgaccagtccgccctgaagcccggcggcctgcgtctgggaactcctgccatgaccactcgtggcttccagcctgaggacttccgtcgtgtcgctgacattgtcgaccgggccgtgatcatcacccagaaactggacaaggctgccaaggagagtgctgccgccaagggagtcaagaaccccaacaccgtcaaggccttcctcgactacgttggtgagggtgaggagatctccgagattgtgctgctgagaaaggaggtggaagactgggtgggcactttcagccttccttgggatgattaa

SEQ ID NO: 9914 - protein, 537 aa, Neosartorya fischeri NRRL 181
MSLSRCGRQASRLIPRSGSSSRATTAITTARRPGFQLQTPTAASRNVQWRSVSSSSRDGQQHLLSASLEEEDPTVYNILQKEKKRQKHFINLIPSENFTSQAVLDALGSVMQNKYSEGYPGARYYGGNEFIDESERLCQQRALETFRLHPEEWGVNVQPLSGSPANLYAISAVLNTHDRLMGLDLPHGGHLSHGYQTPTKKISFISKYFETLPYRLDESTGLIDYDGAEKLALLYRPKLIIAGTSAYSRLIDYPRMRQIADAAGAYLLSDMAHISGLVAAGVLPSPFPHSDIVTTTTHKSLRGPRGAMIFYRKGVRRTDKKGNKEMYDLENLINASVFPGHQGGPHNHTITALSVALKQAQTPEFKAYQETVLANAKALSERLGGPINNGGLGYNIVSGGTDNHLVLVDLKNRGVDGARVERVLELCGVASNKNTVPGDQSALKPGGLRLGTPAMTTRGFQPEDFRRVADIVDRAVIITQKLDKAAKESAAAKGVKNPNTVKAFLDYVGEGEEISEIVLLRKEVEDWVGTFSLPWDD

SEQ ID NO: 9915 - DNA, 1632 bp, Aspergillus clavatus NRRL 1
  CDS (1)..(1632)
atgtctctcagtcggtgcggaccccaggtctcgcgcctgctcccgaggtccggaaactccagagctatcaccaccaccaccatcaccactttctcccgccgtccaggccagcttcttcagacttccacacctgctgtgtgcagcaactctctgcaatggcgcagtgtgtcgcactcgagccgggagagccagcaacatttgctctccgcatccctcgaggaggaggaccccaccgtctacaacatcctgcagaaggagaaaaaacgtcaaaagcacttcatcaacctcatcccctccgagaacttcacatcgcaagccgtcctcgatgcgctcggaagtgtgatgcagaacaagtactcggaaggataccccggtgcccgatactatggaggaaacgagttcatcgatgagtccgagagactgtgccagcagcgtgccttggagaccttcagactcagccccgaggaatggggtgtcaacgtgcagccactgtccggatcgcccgccaacctctacgccatctccgccatcctcaacacccacgaccgtctgatgggcttggacctgccccatgggggtcacctgtcgcacggctaccaaacccccaccaagaagatctccttcatctccaagtacttcgagaccctaccctatcgtctggacgagtccaccggtctcatcgattacgatggtgccgagaagttggctctcctctaccgcccgaagctcatcatcgccgggacctcggcctacagccgtctgatcgattacccccgcatgcgccagattgccgatgccgccggcgcatacctcttaaatgacatggcccacatctcgggtctggtcgccgccggtgtcgtcccctcgcccttcccccactccgacatcgtcaccaccaccactcacaagtcgctgcgcggccctcggggcgccatgatcttctaccgcaagggtctccgccggacggacaagaagggcaacaaggagatgtatgatctcgagaaccccatcaatgcctccgtcttccccggacaccagggcggcccgcacaaccacaccatcaccgccttgtccgtcgccttgaagcaggcgcagacgcccgagttcaaggcctaccaggagaccgtgctggccaacgcccaggcgctggccgaccggctcggtgggcccatcaacaatggcggtctcggctacaacatcgtctccggcggtacggacaaccacctcgtcctggtggacctgaagaaccggggcgtggacggagcccgggtggagcgcgtgctggagctgtgcggcgtggccagcaacaagaataccgttcccggcgacaggtccgcgctgaagcccggcggtctgcgcatcggcacccctgccatgaccacccgcggcttccagcccgaggacttccgccgggtggccgacatcgtggaccgggccgtgatcatcacccagaagctggacaaggcggccaaggagagtgccacggccaagggggtcaagaaccccaacaccgtcaaggccttcctggactacgtcggcgagggcgaggaaatttccgagattgtgctcctacgccaggaggtggaagactgggtgggaacctttagccttccctgggatgaggaaaagtga

SEQ ID NO: 9916 - protein, 543 aa, Aspergillus clavatus NRRL 1
MSLSRCGPQVSRLLPRSGNSRAITTTTITTFSRRPGQLLQTSTPAVCSNSLQWRSVSHSSRESQQHLLSASLEEEDPTVYNILQKEKKRQKHFINLIPSENFTSQAVLDALGSVMQNKYSEGYPGARYYGGNEFIDESERLCQQRALETFRLSPEEWGVNVQPLSGSPANLYAISAILNTHDRLMGLDLPHGGHLSHGYQTPTKKISFISKYFETLPYRLDESTGLIDYDGAEKLALLYRPKLIIAGTSAYSRLIDYPRMRQIADAAGAYLLNDMAHISGLVAAGVVPSPFPHSDIVTTTTHKSLRGPRGAMIFYRKGLRRTDKKGNKEMYDLENPINASVFPGHQGGPHNHTITALSVALKQAQTPEFKAYQETVLANAQALADRLGGPINNGGLGYNIVSGGTDNHLVLVDLKNRGVDGARVERVLELCGVASNKNTVPGDRSALKPGGLRIGTPAMTTRGFQPEDFRRVADIVDRAVIITQKLDKAAKESATAKGVKNPNTVKAFLDYVGEGEEISEIVLLRQEVEDWVGTFSLPWDEEK

SEQ ID NO: 9917 - DNA, 1620 bp, Drosophila pseudoobscura pseudoobscura
  CDS (1)..(1620)
atgcagcgcataagccatcatctaacacaaaagctcgtgccaggccttagcagagacttgaacaccaaaacggttagcttttctcttcgccagcggcagcagccggtcagagcttttacacagaaattattgccggcagcgctgctaacgccatcatttccattcgcgatcagacgatattcggaaggcaaaaaaaccacaactttgggctcgaaaatggaggatcaaaaactgctgcaggccacgctggaggatagcgatccggagctggcgaatctcatcaagcaggagaaggagcgacagcgcgagggactcgaaatgattgccagcgagaatttcacttcggtggccgttctggagagtcttggctcctgcctgaccaacaagtactcggagggatatcccggcaagcggtactatggcggcaacgagttcattgaccgcatcgagctgctggcccagaagcgcggccgtgagctcttcaatctgaacgagaaggagtggggcgtgaatgtccagccatactcgggctccccggccaatatggccgcctatgtgggcgtctgtcgtccgcacgaccgcatcatgggcctggatctgcccgatggcggtcatctgacgcacggcttcttcacggccaccaaacggatctcggccacctcgatcttcttcgagagcatgccttacaaggtgaaccccgtgacgggcattattgactacgacaagctggccgaggcggccaaggccttcaagcctcagatcatcatcgccggcatctcgtgctattctcgcctgctcgactacggacgcttccgtcagatctgcgacgatgtgggcgcctacctaatggccgatatggctcatgtggcaggtctggttgctgccggtcacataccatcgcccttccagtatgccgacattgtgaccacaaccacgcacaaaaccttgcgcggaccacgcgccggcgtcatcttttttcgcaagggtttgcgcagcgtaaagcccaacgggaccaaggtgctgtacgatctggaggatcgcatcaatcaggccgtcttcccatcgctgcagggcggaccacacaacaatgccatagccggcattgccaccgccttcaagcaggccaagtccgcggaattcaagagctaccagtcccatgtgatcaagaacgccaaggtgctgtgcgaggccctgattgccaagggctatcaggtggccaccggcggcactgatgtccatctcgtgctggtggatgtccgaaacgtcggccttaccggtgccagggcggagctaattctcgaggaggtaggaattgcctgcaacaagaacaccgttcccggggacaagtccgccatgaatccgtccggtatccgtttgggcacaccggcgttgaccacgcgcggccttgtcgagaaggacatcgaacaggtggtgaacttcatacatgcggccctcaagatcggcaccgaggccgcccaggctgcgggcagcaacaagatggtcgactttcagacggtcatcgctgaagatgcaacgatcaaggccaagatcgagcagatccacaagtgcgtgatcgcattcagcaaacagttccctctgcccggcctcaagactttttaa

SEQ ID NO: 9918 - protein, 539 aa, Drosophila pseudoobscura pseudoobscura
MQRISHHLTQKLVPGLSRDLNTKTVSFSLRQRQQPVRAFTQKLLPAALLTPSFPFAIRRYSEGKKTTTLGSKMEDQKLLQATLEDSDPELANLIKQEKERQREGLEMIASENFTSVAVLESLGSCLTNKYSEGYPGKRYYGGNEFIDRIELLAQKRGRELFNLNEKEWGVNVQPYSGSPANMAAYVGVCRPHDRIMGLDLPDGGHLTHGFFTATKRISATSIFFESMPYKVNPVTGIIDYDKLAEAAKAFKPQIIIAGISCYSRLLDYGRFRQICDDVGAYLMADMAHVAGLVAAGHIPSPFQYADIVTTTTHKTLRGPRAGVIFFRKGLRSVKPNGTKVLYDLEDRINQAVFPSLQGGPHNNAIAGIATAFKQAKSAEFKSYQSHVIKNAKVLCEALIAKGYQVATGGTDVHLVLVDVRNVGLTGARAELILEEVGIACNKNTVPGDKSAMNPSGIRLGTPALTTRGLVEKDIEQVVNFIHAALKIGTEAAQAAGSNKMVDFQTVIAEDATIKAKIEQIHKCVIAFSKQFPLPGLKTF

SEQ ID NO: 9919 - DNA, 1413 bp, Pichia stipitis CBS 6054
  CDS (1)..(1413): transl_table=12
atgccttacgccctctctgaatcgcacaagcaattggtctcgggccatttagccgaaaccgacccggaagtcgaccaaatcatcaaggatgaaatcgacagacaaagacactccatcgtgctcattgcttctgaaaacttcaccaccaccgccgttttcgacgccttgggaacgcccatgtgtaacaagtactccgaaggttaccctggtgccagatactacggtggtaacgaacacatcgacagaatcgagctcttgtgtcaggaaagagccttgaaggccttcaacgtcactgctgacaagtggggtgtcaatgttcagaccctttctggttctccagccaacttgcaagtctaccaggctatcatgaagccccacgaaagattgatgggtttggacttgcctcacggtggtcatttgtcccacggctaccaaaccgactccagaaagatctcggctgtttctacttattttgaaaccatgccatacagagttgatttggcaactggtttgatcgactacgacatgttggaaaagactgctgtcttgttcagaccaaaggttttggttgctggtacatctgcttactgtagattgatagactacaagagaatgagagaaatcgccgacaaggtcggtgcctaccttgttgtcgacatggcccacatctctggtttggtcgctgctggagtaattccatctcctttcgaatatgctgacatcgtcaccaccaccacccacaagtcgttgagaggcccaagaggtgccatgatcttcttcagaagaggtgtcagatctgtcaaccctaagactggtcaagaaatcttgtacgacttggaaaacccaatcaacttctcggttttccctggccaccaaggtggtccacacaaccacaccatcactgctttagctactgccttgaagcaagctgctactcctgagttcagagagtaccaggaacaggtattgaagaacgccaaggtgttggaaactgaattccttgctaagggataccagttggtttcccacggtaccgactcgcacatggtgttggtttccttgaaggataagaacatcgacggtgccagagttgaaaccgtctgtgaaaagatcaacattgccttgaacaagaactccattccaggcgacaaatctgccttagttccaggtggtgtaagaatcggtgctcctgccatgaccaccagaggcttgggtgaagaagacttcaagaagatcgtcacctacattgactttgccgtcaactacgccaaggagcttcaagcttcgttgccaaaggaagccaacaaattgaaggacttcaagagcgccgtgttgaacggtgacgacgaaaagttgaaggctgtaaaggccgaaatctcgcaatgggctggcgaattcccattgtctgtttaa

SEQ ID NO: 9920 - protein, 470 aa, Pichia stipitis CBS 6054
MPYALSESHKQLVSGHLAETDPEVDQIIKDEIDRQRHSIVLIASENFTTTAVFDALGTPMCNKYSEGYPGARYYGGNEHIDRIELLCQERALKAFNVTADKWGVNVQTLSGSPANLQVYQAIMKPHERLMGLDLPHGGHLSHGYQTDSRKISAVSTYFETMPYRVDLATGLIDYDMLEKTAVLFRPKVLVAGTSAYCRLIDYKRMREIADKVGAYLVVDMAHISGLVAAGVIPSPFEYADIVTTTTHKSLRGPRGAMIFFRRGVRSVNPKTGQEILYDLENPINFSVFPGHQGGPHNHTITALATALKQAATPEFREYQEQVLKNAKVLETEFLAKGYQLVSHGTDSHMVLVSLKDKNIDGARVETVCEKINIALNKNSIPGDKSALVPGGVRIGAPAMTTRGLGEEDFKKIVTYIDFAVNYAKELQASLPKEANKLKDFKSAVLNGDDEKLKAVKAEISQWAGEFPLSV

SEQ ID NO: 9921 - DNA, 1479 bp, Pichia stipitis CBS 6054
  CDS (1)..(1479): transl_table=12
atgctctcttctgtctccagtaccttgagggtacaatccaagagattgcccgttgcaattgccagaagctatgctctttcagcccacgctcaggcactcatctccaagccagttcaggaagtagacccggaaatggctgagatcttgtctcaagagaaagccagacaaaagaactccatcacgttgattccttccgaaaacttcacctcaaaggccgtgatggaccttttgggatcggaaatgcagaacaagtactccgaaggctacccaggcgagagatactatggtggaaatgaaattatcgacaaagctgagtcattatgtcagaaaagagcccttgaagcttttgacttagaccctgcacagtggggtgtcaatgtccagccattatcgggtgctccagccaacttgtacgcctactcagctgttcttgaagtcggagacagaattatgggtttagaccttcctcatgggggccatttgtcgcatggttaccaaaccccgtccgctaagatctcgtacatctccaagtacttccagacgatgccatatcgtttgaacgaggagacaggtatcatcgactacgacaccttggaggccaacgccattttgttcagacccaagatcattgttgctggtgcttctgcctactctcgtgtcattgactaccgtaggatgcgcgcaattgccgataaggtcggagcctacttgttgagcgatatggcccacatttccggtttggtctcggccggagtgactgattctccattcccatactcggatatcgtcaccacgaccacgcacaagtcattgagaggtcccagaggtgccatgatctttttcagaaagggtatcagaaaggtaaccaaaaaaggtaaagaaatcccctacgacttggaaagaaagatcaacttctctgtctttcctgcccaccagggtggtccacacaaccacaccatctctgcgttggctgtggccttgaagcagacacaataccctgaatacaaagagtaccagagagatgtcgttgccaatgctagctcatttgccaatgctcttgtgtcacgtggtttcaaattggtctctgatggaactgatacccacttgattcttgttgacttgagatccaaaaatattgacggagctcgtgttgaggctgttttggagagagccaatatcgctgccaacaaaaatactgttccaggcgataagtcggctttattcccctcgggcttgagagttggaaccccagcaatgactaccagaggcttcggccctgaggaatttgacaaggttgccaagttgatagaaaaggctgtagaaatctcgcttgccttgaaagctcaggaacaaggttctgtccctaaggagttgttggcttcgttcaagaagttggctgattctagtgctgaagtcaaggctttggccaaagaagtatcggactgggcctcgaccttccctgtcccaggcgacttgtaa

SEQ ID NO: 9922 - protein, 492 aa, Pichia stipitis CBS 6054
MLSSVSSTLRVQSKRLPVAIARSYALSAHAQALISKPVQEVDPEMAEILSQEKARQKNSITLIPSENFTSKAVMDLLGSEMQNKYSEGYPGERYYGGNEIIDKAESLCQKRALEAFDLDPAQWGVNVQPLSGAPANLYAYSAVLEVGDRIMGLDLPHGGHLSHGYQTPSAKISYISKYFQTMPYRLNEETGIIDYDTLEANAILFRPKIIVAGASAYSRVIDYRRMRAIADKVGAYLLSDMAHISGLVSAGVTDSPFPYSDIVTTTTHKSLRGPRGAMIFFRKGIRKVTKKGKEIPYDLERKINFSVFPAHQGGPHNHTISALAVALKQTQYPEYKEYQRDVVANASSFANALVSRGFKLVSDGTDTHLILVDLRSKNIDGARVEAVLERANIAANKNTVPGDKSALFPSGLRVGTPAMTTRGFGPEEFDKVAKLIEKAVEISLALKAQEQGSVPKELLASFKKLADSSAEVKALAKEVSDWASTFPVPGDL

SEQ ID NO: 9923 - DNA, 1605 bp, Aspergillus niger CBS 513.88
  CDS (1)..(1605)
atgttgagtcgctgtggacgtcaggcctcgcgcctgatcctgcgcacggcaagctccgctattcggtcgactgccatccctctccagcttcgtcctgcggcagcttctcctttgcgcctgccgggacaaggccgtagcgtgtcctcctcgacccgtgaaggacagcagactctgctctccgcacccctcgaggagtccgaccccgccatctatgacattctccagaaggagaaaaaacgtcagcagcatttcatcaacctcatcccatccgagaacttcacatcgcaagctgtccttgatgcgctgggcagtgtcatgcaaaataaatactcggagggataccccggtgccagatactacggtggaaacgaacacattgacgcctctgagcggctgtgccagcagcgtgcgctcgagacttttggccttaaccccgaagaatggggtgtgaacgtgcaaccgctgtccggctcgcccgctaacctctatgccatttccgccatcctcaacacccacgaccgcttgatgggcctggacctgccccacggcggtcacctgtcccacggctaccagacccccaccaagaagatttcgttcatctcgaaatacttcgaaacgctaccctaccggctagatgagtcgaccggtatcattgactacgacgccctggagaagcaggcgcttctctaccggcccaagctcatcatcgccggtacctcggcctacagccgcttgattgactaccctcgtatgcggcagatcgcagacgccgccggcgcatacttgttgagcgacatggcccacatctccggtctcgtggctgcgggtgtcctcccgtcgcccttcgcccattcggatgtggtgaccaccacgacccacaagtcgctgcggggtccccgcggcgcgatgatattcttccgcaagggtgttcgccggacggacaagaagggtaacccggagatgtatgatctagagggcccgatcaacgcgtccgtgttcccgggtcaccagggtggccctcacaaccatactatcaccgccttggctgtggcgctgaagcaggcgcaatcgcctgagttcaagacctaccagcagacagtgctggccaatgcgcaggccttggcagagcgtcttggtaacccgcttagcagtggaggcctgggatacaacatcgtttccggcggcaccgacaaccacctggtgctggtggatctgaagaaccgcggagtggacggcgcgcgcgtcgagcgggtgctggagctgtgcggtgtggccagcaacaagaacacggtgccgggcgacaagtcggccctgaagcccggtggtctgcgtctgggcacgccggccatgacgacgcgaggcttccagccggaggacttccgccgcgtcgcagacattgtggaccgggcggtgattatcacacagaagttggacaaggcagccaaggagagtgcggccgcaaagggtgtgaagaacccgaacacggtcaaggcgttcttggactatgtgcgcgagggcgaggagattccggagattgtgctgctacgacaggaggtggaggactgggcggggacgttcagtctgccctgggctaaggatgagtag

SEQ ID NO: 9924 - protein, 534 aa, Aspergillus niger CBS 513.88
MLSRCGRQASRLILRTASSAIRSTAIPLQLRPAAASPLRLPGQGRSVSSSTREGQQTLLSAPLEESDPAIYDILQKEKKRQQHFINLIPSENFTSQAVLDALGSVMQNKYSEGYPGARYYGGNEHIDASERLCQQRALETFGLNPEEWGVNVQPLSGSPANLYAISAILNTHDRLMGLDLPHGGHLSHGYQTPTKKISFISKYFETLPYRLDESTGIIDYDALEKQALLYRPKLIIAGTSAYSRLIDYPRMRQIADAAGAYLLSDMAHISGLVAAGVLPSPFAHSDVVTTTTHKSLRGPRGAMIFFRKGVRRTDKKGNPEMYDLEGPINASVFPGHQGGPHNHTITALAVALKQAQSPEFKTYQQTVLANAQALAERLGNPLSSGGLGYNIVSGGTDNHLVLVDLKNRGVDGARVERVLELCGVASNKNTVPGDKSALKPGGLRLGTPAMTTRGFQPEDFRRVADIVDRAVIITQKLDKAAKESAAAKGVKNPNTVKAFLDYVREGEEIPEIVLLRQEVEDWAGTFSLPWAKDE

SEQ ID NO: 9925 - DNA, 1416 bp, Aspergillus niger CBS 513.88
  CDS (1)..(1416)
atggctacctacgctctctctccggctcaccggaaccaaatggaggtgtccctcgtggacagcgatcctgagatcgctcagatcatggagaaggaaatccaacgtcagcgcgaatccatcgtcctgatcgcctcggagaacttcacctcccacgctgtcttcgatgctctgggttcccccatgagcaacaagtactccgagggttaccccggcgctcgctactacggtggcaaccagcacatcgatgccatcgagcttacctgccaggctcgtgccctcaaggctttcaacctggaccccgccaagtggggcgtcaacgttcagtgcctcagtggtagccctgccaacctgcaggtctaccaggccctcatgcgccctcacgaccgtctcatgggtcttgacctcccccacggtggtcacttgagtcacggttaccagactcccgccagaaagatctctgctgtctctacctacttcgagaccttcccctaccgtgtcaaccttgagaccggtatcattgactacgatcaactcgaggccaacgctgagctctaccgccccaagtgcttggtcgctggtacctccgcctactgccgcctgatcgactacgctcgcatgcgcaagatcgctgacaaggtcggcgcctacctcattgtcgacatggctcacatctctggtctgattgccgccggtgtcatcccctcccccttcgagtacgccgatgttgtcaccaccaccacccacaagtccctccgtggtccccgtggtgccatgatcttcttccgcaagggtgtccgcagcactgaccccaagaccggcaaggacatcatgtatgaccttgagggccccatcaacttctctgtcttccctggtcaccagggtggtccccacaaccacaccatcactgctctggctgttgcccttaagcaggttgatacccccgagttcaagcagtaccagcagcaggtcatcaagaacgccaaggccctcgaggaggagttcaaggctctcggtcacaagctcgtctctgacggcactgacagccacatggtccttgtcgacctccgcaacaagagcctggacggtgctcgtgtcgaggctgtcctcgagcagatcaacattgcttgcaacaagaactccatccccggtgacaagtctgctctgaccccctgcggtatccgtatcggtgcccccgccatgaccacccgtggtatgggtgaggaggacttcaagcgcattgcccgctacatcgaccagtccatcaacctctgcaagaaggtccagagcgagcttcccaaggaggccaacaagctcaaggacttcaaggctaaggttgcctccgagaccgtccctgagatcctcagcctccgcaaggaggtcgctgagtgggccagcaccttccccctccccgtctaa

SEQ ID NO: 9926 - protein, 471 aa, Aspergillus niger CBS 513.88
MATYALSPAHRNQMEVSLVDSDPEIAQIMEKEIQRQRESIVLIASENFTSHAVFDALGSPMSNKYSEGYPGARYYGGNQHIDAIELTCQARALKAFNLDPAKWGVNVQCLSGSPANLQVYQALMRPHDRLMGLDLPHGGHLSHGYQTPARKISAVSTYFETFPYRVNLETGIIDYDQLEANAELYRPKCLVAGTSAYCRLIDYARMRKIADKVGAYLIVDMAHISGLIAAGVIPSPFEYADVVTTTTHKSLRGPRGAMIFFRKGVRSTDPKTGKDIMYDLEGPINFSVFPGHQGGPHNHTITALAVALKQVDTPEFKQYQQQVIKNAKALEEEFKALGHKLVSDGTDSHMVLVDLRNKSLDGARVEAVLEQINIACNKNSIPGDKSALTPCGIRIGAPAMTTRGMGEEDFKRIARYIDQSINLCKKVQSELPKEANKLKDFKAKVASETVPEILSLRKEVAEWASTFPLPV

SEQ ID NO: 9927 - DNA, 1551 bp, Magnaporthe grisea 70-15
  CDS (1)..(1551)
atgtcattaccggcaatgaggcaggcggcttcgagggcgctgaggatgcgtgggcccgtgggccggcacgtcaggatggtgtcgacggcttcgcatgagagccagcagaggctgctctcctcgcacctgcaaaccgcagacccggccatgtacgatattgtcgagaaggagaagcagaggcagaagcactacatcaacctcattccgtcggaaaacttcacatcccaggccgtgctggatgctttaggaagcccgatgcagaacaagtattccgagggttaccccggggcgaggtattacggcggtaacgagttcatcgatcaatccgagaggctatgccagcaaagagcattggagacttttggtttggatgacaagcagtggggagtgaacgtgcaagctctctctggcgcccccgccaacttgtacgtatactcggccctcatgggcgtccacgaccgcatgatgggtctagacctgcctcacggcggccatctttcccacggataccagacgccgaccaagaagatctcgttcatctcaaagtactttgagacggtcccctaccggctggacgagtcgaccggctacatagactacgacaagctggaggagctggcacacatctaccgtcccaagatcatcgttgcgggcacctcggcctacagtcggtttatcgactacaagcgcatgcgtgagatctgcgacaaggtcaacgcatacatgctggccgacatggcacacatctcgggtatggtcgcggccaaggtcatcccgggaccttttggctacgccgacattgtgaccacgaccacccacaagtctctgaggggccctcgcggtgccatgatcttcttcaggaagggcgtgcgttcgacgaaccccaagaccaaggctgaggtcatgtacgaccttgagaaccccatcaaccagtccgtcttccccggtcaccagggcggacctcacaaccacaccattgcggccctggccgtggcgctcaagcaggcgcagatgcccgagttccgcgcgtaccaggagcaggtcctcgtcaacgccaaggcttttgcccgccgtctgggtgaggccaagggcaacggcggcggtctgggctacaagatcgtctcgggcggcacggacaaccacctggtcctggcggacctcaagccgcagggcatcgacggcgcccgcgtcgagcgcgtgctggagctggtcggcatcgccgccaacaagaacacggttccgggcgacaagtcggccctgaccccgggaggtctgcgcatgggaacgcccgccatgacgacgcgcggcttcggcgaagacgactttgtgcgcgtcgccgacattgtggaccgggcggtgaccatcgccgtgagggttgacaaggcggccaggaaggcggccgaggccaagggcgagaagagccccggcaagctcaagaacttcttggagtacctgggcaacggcgagacggagagcgagattgtgcagctcaggagcgaggtttccgactgggttgggacataccctctgccgtgggatgtgaagccttga

SEQ ID NO: 9928 - protein, 516 aa, Magnaporthe grisea 70-15
MSLPAMRQAASRALRMRGPVGRHVRMVSTASHESQQRLLSSHLQTADPAMYDIVEKEKQRQKHYINLIPSENFTSQAVLDALGSPMQNKYSEGYPGARYYGGNEFIDQSERLCQQRALETFGLDDKQWGVNVQALSGAPANLYVYSALMGVHDRMMGLDLPHGGHLSHGYQTPTKKISFISKYFETVPYRLDESTGYIDYDKLEELAHIYRPKIIVAGTSAYSRFIDYKRMREICDKVNAYMLADMAHISGMVAAKVIPGPFGYADIVTTTTHKSLRGPRGAMIFFRKGVRSTNPKTKAEVMYDLENPINQSVFPGHQGGPHNHTIAALAVALKQAQMPEFRAYQEQVLVNAKAFARRLGEAKGNGGGLGYKIVSGGTDNHLVLADLKPQGIDGARVERVLELVGIAANKNTVPGDKSALTPGGLRMGTPAMTTRGFGEDDFVRVADIVDRAVTIAVRVDKAARKAAEAKGEKSPGKLKNFLEYLGNGETESEIVQLRSEVSDWVGTYPLPWDVKP

SEQ ID NO: 9929 - DNA, 1578 bp, Ostreococcus lucimarinus CCE9901
  CDS (1)..(1578)
atgcacgccgccgcccgaacgatcgcgcgacgatgcgcgcgacgcgcgtccgtctccacgtccgtcgcgcgtcaattcgcggccgtgccgcagggcgcaggaggcgcgacgagcaacgcggatgaatacgcgaagattcgcgcgacgcacgcgaacgtgacgtggccggaaattatcaataaaccgatcgaagaggtcgatccggagatgtcggagatcatcgagcgggaaaaggcgcgacagtggaaggggctcgaactcattccttcggaaaatttcgtgtcgaagtcggtgatggacgccgtggggtccatcatgacgaacaagtactctgagggttacccgggagcgcgttattacggtggtaacgagttcatcgatatggctgagtcgatgtgccaagagcgcgcgctcaaggcgttcaacctggacccggcgaagtggggggtgaacgtgcagtcgctctcgggttcgcccgcgaacttccaggtgtacaccgcgcttttgcagccgcacgataagatcatggcgctcgatttgccgcacggtggtcacttgtcgcacggttaccaaaccgacacgaagaagattagtgcgacgtccatctttttcacttccgtgccgtaccgcttggacgagtccaccggcttgattgactacgacgcgtgcgaaaagactgcggctttggttcgcccgaagttgatcgtcgccggtgcgtccgcctacgcgcgtttgtacgattacccgcgaatgcgcaagattgcggacaactccaacgccatcttgctcgccgacatggcgcacatttccggtttggtcgccgcgggcgaggtgccgtcgccgttcgactacgccgatgtcgtcaccacgaccacgcacaagtctctccgaggcccgcgtggtgcgatgatcttctaccgtaagggtgagaagggcaaggataagaaaggcaacccgatcatgtacgatttggagagcaagattgatttcgccgtcttcccgggtctccaagggggtccccacaaccacaccatcgccggtctcgcggtggcgctcaagcaagcggctagcccggagttcaaggcttaccaaaggcaagtcatgagcaacatgcaagccatggcgaaccgcctcgtccaacacggtatcaagcttgtgtctgggggtacggataaccatctcgctttgctcgacttgcgcccgatgggcgtcgacggctctcgcgtcgagcgcgtcttggagctcgcgcacatcgcgtgcaacaagaacaccgtcccgggtgacgtttctgccatggtgccgggtggtttgcgcatcggtactccggcgttgacctcgcgtggtttcaccgagaaggattttgaacaagtcgccgagttcatcgttcgcggcatcaaaatcgcgcaagacgtcaagtccaagtctgaaggcaccaagctcaaggacttccgcgccgcgctcgagtccaaggagtggccggagctcacgcaactgaccaaggatgtcgaggagttcgccacgcaattcccgaccatcggtttcgagaaggctgaaggcaagtacacgcagtctctgtga

SEQ ID NO: 9930 - protein, 525 aa, Ostreococcus lucimarinus CCE9901
MHAAARTIARRCARRASVSTSVARQFAAVPQGAGGATSNADEYAKIRATHANVTWPEIINKPIEEVDPEMSEIIEREKARQWKGLELIPSENFVSKSVMDAVGSIMTNKYSEGYPGARYYGGNEFIDMAESMCQERALKAFNLDPAKWGVNVQSLSGSPANFQVYTALLQPHDKIMALDLPHGGHLSHGYQTDTKKISATSIFFTSVPYRLDESTGLIDYDACEKTAALVRPKLIVAGASAYARLYDYPRMRKIADNSNAILLADMAHISGLVAAGEVPSPFDYADVVTTTTHKSLRGPRGAMIFYRKGEKGKDKKGNPIMYDLESKIDFAVFPGLQGGPHNHTIAGLAVALKQAASPEFKAYQRQVMSNMQAMANRLVQHGIKLVSGGTDNHLALLDLRPMGVDGSRVERVLELAHIACNKNTVPGDVSAMVPGGLRIGTPALTSRGFTEKDFEQVAEFIVRGIKIAQDVKSKSEGTKLKDFRAALESKEWPELTQLTKDVEEFATQFPTIGFEKAEGKYTQSL

SEQ ID NO: 9931 - DNA, 1455 bp, Pichia guilliermondii ATCC 6260
  CDS (1)..(1455): transl_table=12
atgttaaatcgtacacttttacaggttgccaggccattggtggcccgccggtatgttggaagtgcccaggcattgatgagcaagcctgtttctgaggtggacccagaaatggcgcaaattttggcagaagagcgcaacagacaaaagacttcggtgacgttaattccatcggaaaacttcacttcgaaggccgtgatggacctcttgggttcggagatgcagaacaagtactccgaggggtatcctggcgagagatattacggaggaaatgaaatcattgacaaggctgagtcattgtgccagaagagagcacttgaatcttttggtttagatccagaaaaatggggtgtcaacgtccagtcgttgtcgggagccccagcgaacttgtacgcctactctgctgttttggaagtgggtgacagaatcatgggtttggatcttcctcatggtggacatctttctcacggttaccagacccccaccaccaaaatctcgtacatttccaaatatttccaaaccatgccttatcgtttgaacgaggagactggtttgatcgactatgatacacttgaagctaatgctcaattgtttcgtcccaaggtaatcgttgctggtgcttcggcgtacctgagagtaattgactatgccagaatgagaaaaattgctgacaaggttggagcctatttgttaagtgatatggctcatatttccggtttggtagccgctggggtgacagcctctccttttgagtactcggacatcgttaccaccactacccacaagtccttgcgtggacctcgtggtgcgatgattttcttcagaaaaggtgtcagaaaggtcaccaagaagggaaaggaagtgttgtacgatttggagcgcaagatcaacttttccgtgttcccagctcatcaaggtggaccccacaaccacaccatctctgctttggctgttgccttgaaacaaacccagtacccagaatacaagcaatatcagcaaaatgtcattgataacgcttcgtctttcgcccaggcgttgcaatctcgtggtttcaagcttgtttctggcggaaccgacacccatttggtattaattgacttgagctcgaagaacattgacggtgctcgtgttgaaggattgttggaaaggatcaacattgctgccaacaaaaacaccgttcccggcgacaagtctgccctcttcccatctgggttgcgtgtgggaaccccagccatgactacccgtggatttggccaagctgagttcgagaaggttgcagagtacattaatcgtgctgttgaactttcgcttaaacttaagggccaggagcaaggttctgtaccaaaagagttgttggcatctttcaagcagttggcagacgagagcaccgaagtcaaggagttggccgaggaggttgcaaaatgggttggacagtatccagttccaggcgatttgtag

SEQ ID NO: 9932 - protein, 484 aa, Pichia guilliermondii ATCC 6260
MLNRTLLQVARPLVARRYVGSAQALMSKPVSEVDPEMAQILAEERNRQKTSVTLIPSENFTSKAVMDLLGSEMQNKYSEGYPGERYYGGNEIIDKAESLCQKRALESFGLDPEKWGVNVQSLSGAPANLYAYSAVLEVGDRIMGLDLPHGGHLSHGYQTPTTKISYISKYFQTMPYRLNEETGLIDYDTLEANAQLFRPKVIVAGASAYLRVIDYARMRKIADKVGAYLLSDMAHISGLVAAGVTASPFEYSDIVTTTTHKSLRGPRGAMIFFRKGVRKVTKKGKEVLYDLERKINFSVFPAHQGGPHNHTISALAVALKQTQYPEYKQYQQNVIDNASSFAQALQSRGFKLVSGGTDTHLVLIDLSSKNIDGARVEGLLERINIAANKNTVPGDKSALFPSGLRVGTPAMTTRGFGQAEFEKVAEYINRAVELSLKLKGQEQGSVPKELLASFKQLADESTEVKELAEEVAKWVGQYPVPGDL

SEQ ID NO: 9933 - DNA, 1461 bp, Lodderomyces elongisporus NRRL YB-4239
  CDS (1)..(1461)
atgttatcaagatcattcaaatcagcaagaacagtaagggcattgatgtcctctactgcttctgtgcgttcattatcgttcctttcgaaacctgttagcgaagtagacccagagatggctagcattttagaacaagaaagaactagacaacgtcaatgtatcagtttgattccctcggaaaactatacttccaagtcagtaatggagttgcttggatcggagatgcaaaacaagtatagtgaggggtatccaggtgagcgttactatggaggtaacaagattatcgataaatctgagtcgctttgtcaacaacgtgcattggaagcttttggattgaaccctgaagagtggggagttaatgtgcaagcattatccggtgcaccagcaaatctttacacatactcagcaatcttggaagttggtgacagaatcatgggattggacttgcctcatggtggacatttgtctcatggttaccaaaccaatactgcaaagatttcatttatttcaaagtatttccaaaccatgccatacagattggatgagctgactggattaattgattatgacacattggaaaagaatgctcaattgtttagaccaaaagttattgttgctggtgcatctgcatactcaagagtgattgactacaaaagaatgaaacaaattgccgacaaggttggtgcttacttgatgtctgatatggcgcacatttctggattggtttctgcaggagttactgagtccccattcccatactccgatattgttaccaccaccacacacaaatcattaaggggaccaagaggtgccatgatctttttcagaaaaggtattagaaaagttaccaaaaagggtaaagaaatcccatatgagttggaaagaaagattaacttttcagttttccctggtcatcaaggtggtccacacaaccacaccatttccgccttggctgttgccttgaagcaatgtgcagagccagactacaaaaaataccaacaagctgttgttgacaatgcaaagcattttgccaatgaattacaaagcaaaggctttgacttggtgtcaggtggtacagatacccatttgatcttggttgacttgagctcgaaaaagattgatggtgcacgtgtagaagctgttttggaaagagccaatattgctgcaaataaaaacaccatccctggtgacactagtgctctcttcccctctggtttaagagttggaacacccgcaatgaccactagaggatttggttttgatgaatttaccaaagttgctgagctcatggacgaagctgttgcaattgcaattgaattgaaggcaaaggaacaaggtaaagtgcctaaagaattgttggcttcattcaaaaaattggctgacgaaagtgacaaagtcaaggagcttggacaaagagtagctgagtggacaacaacatacccagtgccaggtgatttgtaa

SEQ ID NO: 9934 - protein, 486 aa, Lodderomyces elongisporus NRRL YB-4239
MLSRSFKSARTVRALMSSTASVRSLSFLSKPVSEVDPEMASILEQERTRQRQCISLIPSENYTSKSVMELLGSEMQNKYSEGYPGERYYGGNKIIDKSESLCQQRALEAFGLNPEEWGVNVQALSGAPANLYTYSAILEVGDRIMGLDLPHGGHLSHGYQTNTAKISFISKYFQTMPYRLDELTGLIDYDTLEKNAQLFRPKVIVAGASAYSRVIDYKRMKQIADKVGAYLMSDMAHISGLVSAGVTESPFPYSDIVTTTTHKSLRGPRGAMIFFRKGIRKVTKKGKEIPYELERKINFSVFPGHQGGPHNHTISALAVALKQCAEPDYKKYQQAVVDNAKHFANELQSKGFDLVSGGTDTHLILVDLSSKKIDGARVEAVLERANIAANKNTIPGDTSALFPSGLRVGTPAMTTRGFGFDEFTKVAELMDEAVAIAIELKAKEQGKVPKELLASFKKLADESDKVKELGQRVAEWTTTYPVPGDL

SEQ ID NO: 9935 - DNA, 1560 bp, Ajellomyces capsulatus NAm1
  CDS (1)..(1560)
atgtcgctcaatatttgctccagacgggccagcatccgacttcttctcttgcgggggagctccagaactcgtctcggccgtgcgaatcatcccgacggattgctgccaatcctttgccgtggcatctcctctgctcactctgatggacatcaaaagatcctatccgagaaccttaaagaggccgaccctgccgtttacaaaattatccagcaagagaaaagccgccaaaaacattttatcaatttgatcccatccgagaacttcacgtcccaggcggttctcgatgccttgggaagtgtcatgcagaataaatattcagaaggctaccctggagcacggtattatggtggtaaccagttcattgaccaggcggagagactttgtcagcagcgggctctcaaggcgttcggtctcaaggaagaggaatggggggtcaacgtgcaaccactctctggttctccggcgaacctctacgcatattccgcactccttaatacccatgaccgtatcatgggcttggatcttccccacggcggccatctttcccacggatatcaaaccccaacgaagaaaatttccgctgtgtctaaatatttcgagacactcccatataggttagatgaatcaaccggcctcatcgactatgacaaactagcagacttggcccagctctatcgaccaaagctcatcattgccggcacatccgcatatagcagactcatcgattacccgcgcatgcgcaaaattgctgatagcgtcggtgcttacttactctgtgatatggcccatatttccggattagttgctgctggcgttataccctcgccatttgtacactcggacgtcgttacaactacaacccataaatccctccgaggaccccgtggcgccatgattttcttccgcaagggagtccgccacaccgacgccaagggcaacccagtgatgtatgacctcgagaaccccatcaatgcgtccgttttccccggtcaccagggcgggccccacaaccacaccatcagcgcgctcgccgtagccctgcagcaggcgaccaccccagaattcaaaacataccaagaaaccgttcttgagaacgccaaagcactggcggaccggcttggcaagcccaccaacagtggcgggctgggctacaacatcgtttccggcggcacagacaaccatcttgtgctcgtcgatctgaagaaccgcggcgtggacggggcgcgtgtggagcgggtgcttgaactgtgcggcgtggcgagcaacaaaaacaccgtgcccggtgataagtctgcgatgaaacccggcggcctacgaatcgggacaccggcgatgacatcgcgtggcttcgggccagaggactttgtgcgagttgcggacatcgtcgaccgtgcggtgacgattacgcagaaactggataagaccgccaaagcggatgcggaggcaaagaagaagaagaaccctggcagcgtgaaagcgttcctggagtatctgggcgaaggacaggcgatccctgagatcacgacattgagacaggaggttgaggattggtgcccatga

SEQ ID NO: 9936 - protein, 519 aa, Ajellomyces capsulatus NAm1
MSLNICSRRASIRLLLLRGSSRTRLGRANHPDGLLPILCRGISSAHSDGHQKILSENLKEADPAVYKIIQQEKSRQKHFINLIPSENFTSQAVLDALGSVMQNKYSEGYPGARYYGGNQFIDQAERLCQQRALKAFGLKEEEWGVNVQPLSGSPANLYAYSALLNTHDRIMGLDLPHGGHLSHGYQTPTKKISAVSKYFETLPYRLDESTGLIDYDKLADLAQLYRPKLIIAGTSAYSRLIDYPRMRKIADSVGAYLLCDMAHISGLVAAGVIPSPFVHSDVVTTTTHKSLRGPRGAMIFFRKGVRHTDAKGNPVMYDLENPINASVFPGHQGGPHNHTISALAVALQQATTPEFKTYQETVLENAKALADRLGKPTNSGGLGYNIVSGGTDNHLVLVDLKNRGVDGARVERVLELCGVASNKNTVPGDKSAMKPGGLRIGTPAMTSRGFGPEDFVRVADIVDRAVTITQKLDKTAKADAEAKKKKNPGSVKAFLEYLGEGQAIPEITTLRQEVEDWCP

SEQ ID NO: 9937 - DNA, 1551 bp, Botryotinia fuckeliana B05.10
  CDS (1)..(1551)
atgtcgctctttaaaggagcctcaagaactgtgttcagggctactactgcgcaaagagcagcagcttcaatatgtggcgcgagaagagcggcgagtagtagtcgaatgactatggaaagtcaacaaaagttactctcggcagatcttgaacatgcagatccagcagtcttcagcattctccaaaatgaaaaacggaggcagaagcacttcatcaaccttattccttccgaaaacttcacatcacaagctgttttagatgcattgggaagtgttatgcaaagatatccaggggcaagatattatggaggaaatgagttcatcgacgaatccgaaaggttatgccaaagtcgtgctctacagacttttggtttgaaagagtcggaatggggtgtcaatgttcaaccactgtctggttctcccgcaaatctctacgcatattccgctctcgccaatacacatgacagaataatgggattagatttgcctcacggtggtcatctttctcatggatatcaaactcctaccaaaaaaatttccgctatctcaaaatactttgaaactttaccatatcgattggatgaaagcacaggactcattgactacgctaaattggaggaactcgctacattgtacagaccaaagattattgttgccggtacatcagcgtacagtagactcattgagtatgagcgtatgcgtgaaattgccgacaaggttggagcatatctattagctgatatggcacacatttctggtcttgttgccgcaaaggttattccaagtccttttgaatatgcagatgtcgtcacaactactacacacaaatcactcagaggtcctcgaggtgctatgattttcttccgaaaaggagttaggagagttaatccaaaaacaaaagaagaagagatgtggaatcttgaagatccaattaatgcatcagtatttccaggacatcaaggaggtcctcacaaccatactattactgccttggcagttgcattaaagcaagcacaaagtgttgaattcagagcttaccaagaagcagttctactaaatgcaaaggcatttgcaaagcgtctgggtgattcaaaagataaagggggtctcggttactccatcgtctccgggggtaccgataaccatcttgtactcattgacttgaagcctcaaggagttgatggtgcccgagttgaacgtgttcttgaactcgttggagtcgcatccaataagaatacagttccaggtgataaatctgcccttaaacctggtggattaagaatgggtacaccagctatgacaactcgtggtttccagcctgaagatttcgtacgggttgccgacgttgtaaatagagccgttactataactcaacgattggataaaagtgcaagggaagcagcagaggcaaagggaagaaagaaccctggtagtgtaaaggctttcttggagtaccttggcgaaggcgagaatgagagagagattgtacaattgagaagtgaagttgaggaatgggttggcactttctccctaccatgggaggagagtagttaa

SEQ ID NO: 9938 - protein, 516 aa, Botryotinia fuckeliana B05.10
MSLFKGASRTVFRATTAQRAAASICGARRAASSSRMTMESQQKLLSADLEHADPAVFSILQNEKRRQKHFINLIPSENFTSQAVLDALGSVMQRYPGARYYGGNEFIDESERLCQSRALQTFGLKESEWGVNVQPLSGSPANLYAYSALANTHDRIMGLDLPHGGHLSHGYQTPTKKISAISKYFETLPYRLDESTGLIDYAKLEELATLYRPKIIVAGTSAYSRLIEYERMREIADKVGAYLLADMAHISGLVAAKVIPSPFEYADVVTTTTHKSLRGPRGAMIFFRKGVRRVNPKTKEEEMWNLEDPINASVFPGHQGGPHNHTITALAVALKQAQSVEFRAYQEAVLLNAKAFAKRLGDSKDKGGLGYSIVSGGTDNHLVLIDLKPQGVDGARVERVLELVGVASNKNTVPGDKSALKPGGLRMGTPAMTTRGFQPEDFVRVADVVNRAVTITQRLDKSAREAAEAKGRKNPGSVKAFLEYLGEGENEREIVQLRSEVEEWVGTFSLPWEESS

SEQ ID NO: 9939 - DNA, 1566 bp, Sclerotinia sclerotiorum 1980
  CDS (1)..(1566)
atgtcgctctttaaaggagcctcaagaactgtgttcagagctgttgctgcgcaaagagcagcaacttcaatatgtggcgcaagaacagcggcgactagtagtcgaatgaccatagaaagtcaacaaaagctactctcagcaaacctcgaacacgcagatccagcagtcttcagtattctccaaaatgagaaacgaaggcagaagcacttcattaatcttattccttccgaaaacttcacatcacaagctgttttggatgcattgggaagtgttatgcaaaataaatattccgaaggatacccgggtgcaagatattatggaggaaacgaatttattgacgaatccgaaagattgtgccaatcccgcgctctacagacttttggattgaaggaatcagaatggggagtcaatgttcaaccattatccggttccccagcaaatctttacgcatactccgctctcgcaaatactcatgacagaataatgggattggatttacctcatggtggccatctctcccatggataccaaactcctaccaaaaaaatatcggctatttcaaaatacttcgagactctaccgtatagattggatgaaagtacaggacttattgattacgccaaattggaggagcttgcaacactgtacagaccaaagattattgttgctggcacctcagcgtatagcagactcatcgagtatgagcgtatgcgtgagattgctgacaaagttggggcattcctgttggctgatatggcacatatttctggcctcgtcgcggcaaaagtcattccaagtcctttcgaatatgcagatgtcgtcaccactaccacacataaatcactcaggggtcctcggggtgctatgattttctttagaaagggagttagaagagtcaatccaaaaacaaaggaagaagagatgtggaatcttgaagatccaattaatgcatcagtcttcccgggacatcaaggaggtcctcataatcatactatcactgcattggcagttgcacttaaacaagcacaaagtgttgaattcagagcttaccaagaagcggttttactaaacgcaaaagcattcgcaaagcgtctgggtgactcaaaagataaagggggtctcggctactccattgtatctggaggtacagataaccatcttgtactcattgacttgaaacctcaaggagttgatggtgcccgagttgaacgtgttctcgaactcgtcggagtagcatccaacaagaataccgttcctggagacaaatccgcgcttaagcctggtggactaagaatgggtacaccagctatgactactcgtggttttcaacccgatgacttcgttcgtgttgccgacgttgtaaatagagctgtcaccataactcaacgactagacaaaactgcaaaggaggctgcagaagcaaagggaagaaagaatcctggtagtgtaaaggctttcttagagtatcttggcgagggtgagaatgagagagagattgtacagttgagaagtgaagttgaggaatgggttggcactttctcattaccatgggaagaaagtagctag

SEQ ID NO: 9940 - protein, 521 aa, Sclerotinia sclerotiorum 1980
MSLFKGASRTVFRAVAAQRAATSICGARTAATSSRMTIESQQKLLSANLEHADPAVFSILQNEKRRQKHFINLIPSENFTSQAVLDALGSVMQNKYSEGYPGARYYGGNEFIDESERLCQSRALQTFGLKESEWGVNVQPLSGSPANLYAYSALANTHDRIMGLDLPHGGHLSHGYQTPTKKISAISKYFETLPYRLDESTGLIDYAKLEELATLYRPKIIVAGTSAYSRLIEYERMREIADKVGAFLLADMAHISGLVAAKVIPSPFEYADVVTTTTHKSLRGPRGAMIFFRKGVRRVNPKTKEEEMWNLEDPINASVFPGHQGGPHNHTITALAVALKQAQSVEFRAYQEAVLLNAKAFAKRLGDSKDKGGLGYSIVSGGTDNHLVLIDLKPQGVDGARVERVLELVGVASNKNTVPGDKSALKPGGLRMGTPAMTTRGFQPDDFVRVADVVNRAVTITQRLDKTAKEAAEAKGRKNPGSVKAFLEYLGEGENEREIVQLRSEVEEWVGTFSLPWEESS

SEQ ID NO: 9941 - DNA, 1413 bp, Nematostella vectensis
  CDS (1)..(1413)
atggaagagttactggatagcgactccatgagtttgcagaaatccctcgaggaaactgacccggtgatgtatgagatcttgaagaaggagaaacaccggcagattcatggactggaactcatcgcatctgaaaatttcaccagccaagcggtgatggaagccacgggatcgtgtatgactaataaatactcggagggacaagttggtcagaggtattatggcgggaataaatacgtggatgagatggagtcgttgtgtaagagtcgagcgcttgagctctttagattggacccagaaaaatggggtgtcaatgttcagatctactcaggatcccctgcaaactttgccgtttacactgcccttcttaatcctcacgaccggatcatgggtctagacctccctgatggaggccatctgacgcatggcttcatgacagacaagaagcgaatctccgcaacatcaatctactttgaatcaatgccttataagacaaatgcccagactggttatattgattatgaccagcttgctgagaatgctcgcctgttccgccccaagctcatcattgcagggataagtgcataccctcgtcatctagactatgccaaatttaggcagatctgtgatgaagtaggggcatacttattggccgacatggctcacattagcggcctggtcgcatctgatgttgtgcctggtccatttgagtatgccgatgttgtgacaacaactacccataaatccttgcgtggtcctagggccggtatgatcttttatcgcaagggtatcaaaggctacaagaagaatggagaccccataaagtatgactatggctccaagattgactttgccgttttccctgccctacaaggtggtccccacaatcaccagattgcaggtcttgccgtggctctcaagcaagccatgacacctgagttcaaggcttatggacagcagatactgggtaattgtaaggcgatggctgaggtgttcatggagcgtggatacaaacttgtgacggacggcactgacaaccatctggtcctgatggacttgaggccaaaaggaattggaggagcacaggctgagagaattttagaggagatttccatcactgtgaacaagaacacatgcccaggcgacaagagtgccttgaagccaggagggcttcgcattggggcccccgccctcacttcccgcaagttcaaggttcatgacttcaaacaagttgctgactttattgaccgcggcatcaaactggggctggaaatccaggaagttgctggtactgacttcaagaagttcatagaagctctttccagtgagaagttttcagaaaaagtagaaagtctgcgcaaagaggttgagaagttttctggaaagttccctatgccaggaagagacaccatctga

SEQ ID NO: 9942 - protein, 470 aa, Nematostella vectensis
MEELLDSDSMSLQKSLEETDPVMYEILKKEKHRQIHGLELIASENFTSQAVMEATGSCMTNKYSEGQVGQRYYGGNKYVDEMESLCKSRALELFRLDPEKWGVNVQIYSGSPANFAVYTALLNPHDRIMGLDLPDGGHLTHGFMTDKKRISATSIYFESMPYKTNAQTGYIDYDQLAENARLFRPKLIIAGISAYPRHLDYAKFRQICDEVGAYLLADMAHISGLVASDVVPGPFEYADVVTTTTHKSLRGPRAGMIFYRKGIKGYKKNGDPIKYDYGSKIDFAVFPALQGGPHNHQIAGLAVALKQAMTPEFKAYGQQILGNCKAMAEVFMERGYKLVTDGTDNHLVLMDLRPKGIGGAQAERILEEISITVNKNTCPGDKSALKPGGLRIGAPALTSRKFKVHDFKQVADFIDRGIKLGLEIQEVAGTDFKKFIEALSSEKFSEKVESLRKEVEKFSGKFPMPGRDTI

SEQ ID NO: 9943 - DNA, 1410 bp, Vanderwaltozyma polyspora DSM 70294
  CDS (1)..(1410)
atgacgtacaccttatcagagtcacatcgaactttattacagacgcatttaagtcaaactgatcctgagcttgaaagtattattaaagatgaaatagagagacaaaaacactcaattgatctaattgcatctgaaaattttacatcaacttctgtttatgatgctctaggcactcctttatcaaataagtattctgaaggatatcctggtgctcgttattacggtggtaatgaacatattgatcgtgttgaatccttatgccaaaagagagcattagaagcatttaaattaaatgaaaaagattggggagtcaatgttcagccattatctggttctcctgcaaatttggaagtgtaccaagcactaatgaaaccacatgacagacttatgggattgtatttacccgacggtggccatctatctcatggttacgcaacagagacaaggtctatatctgctgtatccacctatttcgaatctttcccatatagagttaatccaaacactggaataattgattatgacagtttagaacgaaatgccatcttatatagaccaaaaattttgatagctggaacatcttcttattgtcgtttaatagactacaagagaatgaaagaaattgctgataaatgtggcgcctatttaatggtagatattgctcacattgcaggtttaattgttgcggatgtcattccttcaccattcgaatatgctgacgttgtcacaacaactactcataaatctttaagaggtccccgtggtgcaatgatatttttcagaaggggaatcaagtcaataaatcagaaaacaggtaaagaacaaccatttgatttagaaaatcgtattaatttttctgtattcccaggacatcaaggtggtccacacaaccatacgatagctgctctagctacaacattgaaacaagcaactactccagagttcaaagaataccaattacaagtattgaaaaatgctaaatcaatggaagaagaatttaaaaaattgggttacaaattggtatctgatgggactgattcacatatggttttagtttcattaaaggagataggtttagatggcgctcgaattgaatacgtatgtgaaaagatcaatatagtcctaaataaaaactcgattcctggcgacaaatctgcaatagtacctggtggaatacgtgttggtgccccagcaatgacaacaagaggtatgggcgaagctgatttcaagcgtgtcgttgaatatattaaccaagctgtcaacttcgcaaaggaaattcagagttcacttccagtagatcataataaattaaaggactttaagatagcagtcgatggattggctggaaatttggaagaattgaagattgatattttcaattgggcaggatcatttccacttcctgtttaa

SEQ ID NO: 9944 - protein, 469 aa, Vanderwaltozyma polyspora DSM 70294
MTYTLSESHRTLLQTHLSQTDPELESIIKDEIERQKHSIDLIASENFTSTSVYDALGTPLSNKYSEGYPGARYYGGNEHIDRVESLCQKRALEAFKLNEKDWGVNVQPLSGSPANLEVYQALMKPHDRLMGLYLPDGGHLSHGYATETRSISAVSTYFESFPYRVNPNTGIIDYDSLERNAILYRPKILIAGTSSYCRLIDYKRMKEIADKCGAYLMVDIAHIAGLIVADVIPSPFEYADVVTTTTHKSLRGPRGAMIFFRRGIKSINQKTGKEQPFDLENRINFSVFPGHQGGPHNHTIAALATTLKQATTPEFKEYQLQVLKNAKSMEEEFKKLGYKLVSDGTDSHMVLVSLKEIGLDGARIEYVCEKINIVLNKNSIPGDKSAIVPGGIRVGAPAMTTRGMGEADFKRVVEYINQAVNFAKEIQSSLPVDHNKLKDFKIAVDGLAGNLEELKIDIFNWAGSFPLPV

SEQ ID NO: 9945 - DNA, 1428 bp, Aedes aegypti
  CDS (1)..(1428)
atgcctctatgtaatcataaaaatatgtccggcaatgccaagctgttgcacgagaacctctgggagtcggacccggagctgatggacctgatccggaaggagaagaaacgccaggtgcacgggctggagatgatcgccagtgagaacttcacctcgctctcggtgctgcagtgcctgggatcctgcctgcacaacaagtactccgagggattgcccggacagagatactacggtggcaacgaattcatcgacgagatcgaattgctggcgcagaaacgtgccctcgaagcataccgcctcaacccggatgaatggggctgcaacgtgcagccgtactccggttcgccggccaactttgccgtctacaccggactgatcgaaccgcacggtcgcatcatgggcctggacctgcctgatggtggccacttgacgcacggattcatgaccgccaccaagaaaatctccgccacgtcgatcttcttcgagagcatgccctacaaggtggatccggtgacgggcctgatcgactacgacaaactggaggagagcgccaagaacttcaagcccaagatcatcatcgccggaatctcgtgctattcccggtgcttagactacaaacgcttccgccagattgccgacgccaacggtgcattcctgtttgccgatatggctcacatctctggattggtcgctgccggtgtcatcccatcgccttttgaatacgccgatgtggtcagcacaaccacacacaaatcgctgcggggaccccgcgccggagtgatcttcttccgcaagggcgttcgcagcgtcaagcccaacggcgacaaggtgatgtacgatctggaggcaaaaatcaatcaggctgtgttccccggaatccagggaggaccacacaaccacgccattgccggtattgccacgtgcatgctgcaggcccggacgcccgagttcaaagactaccagacacagatcatccgtaacgcacaagccctgtgcaagggtctgctcgagcggggctactccatttcgaccgggggaaccgatgttcatctggtgttggtggaccttcgcccggctggcatcaccggagcccgtgcggagtacgtcctggaggagatttccattgcctgcaacaagaataccgttcccggagacaagagtgcactgaacccgtccggaatccggttgggtacgccggcgttgacgacccgaggtttggtggagtctgatatgacccatgtggtggacttcatcgatcggggactgaaactgtcgaaggagattacggccgtctcgggtccgaagctggtggacttcaagcgagtgctgcacgaggatccgacgctgaacgctaaggtgcaagctctaaaggaggaagttcaggcgtacagcgcgaagttccccatgccaggctatgaggagttctag

SEQ ID NO: 9946 - protein, 475 aa, Aedes aegypti
MPLCNHKNMSGNAKLLHENLWESDPELMDLIRKEKKRQVHGLEMIASENFTSLSVLQCLGSCLHNKYSEGLPGQRYYGGNEFIDEIELLAQKRALEAYRLNPDEWGCNVQPYSGSPANFAVYTGLIEPHGRIMGLDLPDGGHLTHGFMTATKKISATSIFFESMPYKVDPVTGLIDYDKLEESAKNFKPKIIIAGISCYSRCLDYKRFRQIADANGAFLFADMAHISGLVAAGVIPSPFEYADVVSTTTHKSLRGPRAGVIFFRKGVRSVKPNGDKVMYDLEAKINQAVFPGIQGGPHNHAIAGIATCMLQARTPEFKDYQTQIIRNAQALCKGLLERGYSISTGGTDVHLVLVDLRPAGITGARAEYVLEEISIACNKNTVPGDKSALNPSGIRLGTPALTTRGLVESDMTHVVDFIDRGLKLSKEITAVSGPKLVDFKRVLHEDPTLNAKVQALKEEVQAYSAKFPMPGYEEF

SEQ ID NO: 9947 - DNA, 1722 bp, Aedes aegypti
  CDS (1)..(1722)
atgtcggccaatatcgtacgtgccggagtggcacctctcgctcgctcccacggggcacctgcgatgatcggcttgcgtctgcgtctggataaacatcaacatcagtgtccagcagtaagtggatccagcaccactaccactgcaatcatctccggaacgaggcactttggaacgacgacgatttcatcatcctgcgcgccatcgccacagtcaacgcttccatcgtccctgaagaatcgatccttttccgatacgaagcggtctatctgttctgtgtccggtgtcctcaacggtgtcagccttccgaaagccacaaagatgtccggcaatgccaagctgttgcacgagaacctctgggagtcggacccggagctgatggacctgatccggaaggagaagaaacgccaggtgcacgggctggagatgatcgccagtgagaacttcacctcgctctcggtgctgcagtgcctgggatcctgcctgcacaacaagtactccgagggattgcccggacagagatactacggtggcaacgaattcatcgacgagatcgaattgctggcgcagaaacgtgccctcgaagcataccgcctcaacccggatgaatggggctgcaacgtgcagccgtactccggttcgccggccaactttgccgtctacaccggactgatcgaaccgcacggtcgcatcatgggcctggacctgcctgatggtggccacttgacgcacggattcatgaccgccaccaagaaaatctccgccacgtcgatcttcttcgagagcatgccctacaaggtggatccggtgacgggcctgatcgactacgacaaactggaggagagcgccaagaacttcaagcccaagatcatcatcgccggaatctcgtgctattcccggtgcttagactacaaacgcttccgccagattgccgacgccaacggtgcattcctgtttgccgatatggctcacatctctggattggtcgctgccggtgtcatcccatcgccttttgaatacgccgatgtggtcagcacaaccacacacaaatcgctgcggggaccccgcgccggagtgatcttcttccgcaagggcgttcgcagcgtcaagcccaacggcgacaaggtgatgtacgatctggaggcaaaaatcaatcaggctgtgttccccggaatccagggaggaccacacaaccacgccattgccggtattgccacgtgcatgctgcaggcccggacgcccgagttcaaagactaccagacacagatcatccgtaacgcacaagccctgtgcaagggtctgctcgagcggggctactccatttcgaccgggggaaccgatgttcatctggtgttggtggaccttcgcccggctggcatcaccggagcccgtgcggagtacgtcctggaggagatttccattgcctgcaacaagaataccgttcccggagacaagagtgcactgaacccgtccggaatccggttgggtacgccggcgttgacgacccgaggtttggtggagtctgatatgacccatgtggtggacttcatcgatcggggactgaaactgtcgaaggagattacggccgtctcgggtccgaagctggtggacttcaagcgagtgctgcacgaggatccgacgctgaacgctaaggtgcaagctctaaaggaggaagttcaggcgtacagcgcgaagttccccatgccaggctatgaggagttctag

SEQ ID NO: 9948 - protein, 573 aa, Aedes aegypti
MSANIVRAGVAPLARSHGAPAMIGLRLRLDKHQHQCPAVSGSSTTTTAIISGTRHFGTTTISSSCAPSPQSTLPSSLKNRSFSDTKRSICSVSGVLNGVSLPKATKMSGNAKLLHENLWESDPELMDLIRKEKKRQVHGLEMIASENFTSLSVLQCLGSCLHNKYSEGLPGQRYYGGNEFIDEIELLAQKRALEAYRLNPDEWGCNVQPYSGSPANFAVYTGLIEPHGRIMGLDLPDGGHLTHGFMTATKKISATSIFFESMPYKVDPVTGLIDYDKLEESAKNFKPKIIIAGISCYSRCLDYKRFRQIADANGAFLFADMAHISGLVAAGVIPSPFEYADVVSTTTHKSLRGPRAGVIFFRKGVRSVKPNGDKVMYDLEAKINQAVFPGIQGGPHNHAIAGIATCMLQARTPEFKDYQTQIIRNAQALCKGLLERGYSISTGGTDVHLVLVDLRPAGITGARAEYVLEEISIACNKNTVPGDKSALNPSGIRLGTPALTTRGLVESDMTHVVDFIDRGLKLSKEITAVSGPKLVDFKRVLHEDPTLNAKVQALKEEVQAYSAKFPMPGYEEF

SEQ ID NO: 9949 - DNA, 1464 bp, Chlamydomonas reinhardtii
  CDS (1)..(1464)
atgcagcttcagcagcgtctgccctccggcggtgccgcccgcagcgcgcgcgcttcgcgccgcaccgtgtccgtccaggccactgtcgctccccccgctcctacctcgggcaagaagctgttccagtatgatggcgctctttctgaggtcgacccggagattagtgctctcatcaccaaggagaagtctcgccaggtccgtggcctggagctgattgcctcggagaacttcacctccaaggcggtgatgcaagccctgggctcgtgcatgaccaacaagtactccgagggtcgccccaacgcgcgctactacggcggcaacgagtacattgaccaggtcgagctgctgtgcgagaagcgcgccctggagctgtttggcctggacccggcggagtggggcgtcaacgtgcagccgctgtcgggctcgcccgccaacttcgcggtgtacacggcgctgctgcagccgcacgaccgcatcatgggcctggacctgccgcacggcggccacctgacgcacggcttcatgaccgccaagcgccgcgtcagcgccacctcgattttcttcgagtccatgccctaccgcctcaacgaggccaccggcaccatcgactacgagacgctggagaagaccgccaccctgttccggcccaagctcatcattgccggcgcctcggcctacagccgcaactacgactacgcgcgcatgcgggctgtggcggacagctgcgaggcctacctcatgtcggacatggcgcacatcagcggcctggtcgccgccggtgtggccaccagccccttcgcgcactcgcacatcgtgaccaccaccacgcacaagtcgctgcgcggcccccgcggcggcatgatcttctaccgccgcgagctcaaggacaagattgaccaggccgtgttccccggtctgcagggcggcccccacaaccacaccatctcggcgctggctgtggcgctcaagatggccaacaccgaggagttccgcacctaccagaagcaggtggtggccaactgctctgcgctgtgcgggcggctgcagcagcacggctacaagatcgtgtctgacggcaccgacaaccacctggtgctgctggacctcaagccggcgggcattgacggagcgcgcgtgcagacggtcctggacgcggtgtccatcacgctcaacaagaactcggtgcccggcgacaagagcgccatggtgcccggcggcatccgcatcggcacgcccgcgctcaccacccgcggcttccaggagaaggacttcgagcaggtggctgacttcatccaccgcgccatcaccatcgccaaggactgccaggccaagacgcccgcgcccggcaagctcaaggagttcaaggagtacctggagggcgccggcgccgcccgccccgacatcgccgcgctgcgggccgaggtggaggcgctcgccacctccttccccatgcccggcctgtaa

SEQ ID NO: 9950 - protein, 487 aa, Chlamydomonas reinhardtii
MQLQQRLPSGGAARSARASRRTVSVQATVAPPAPTSGKKLFQYDGALSEVDPEISALITKEKSRQVRGLELIASENFTSKAVMQALGSCMTNKYSEGRPNARYYGGNEYIDQVELLCEKRALELFGLDPAEWGVNVQPLSGSPANFAVYTALLQPHDRIMGLDLPHGGHLTHGFMTAKRRVSATSIFFESMPYRLNEATGTIDYETLEKTATLFRPKLIIAGASAYSRNYDYARMRAVADSCEAYLMSDMAHISGLVAAGVATSPFAHSHIVTTTTHKSLRGPRGGMIFYRRELKDKIDQAVFPGLQGGPHNHTISALAVALKMANTEEFRTYQKQVVANCSALCGRLQQHGYKIVSDGTDNHLVLLDLKPAGIDGARVQTVLDAVSITLNKNSVPGDKSAMVPGGIRIGTPALTTRGFQEKDFEQVADFIHRAITIAKDCQAKTPAPGKLKEFKEYLEGAGAARPDIAALRAEVEALATSFPMPGL

SEQ ID NO: 9951 - DNA, 1563 bp, Chlamydomonas reinhardtii
  CDS (1)..(1563)
atgcagcgcactgtgcagggtatttcgcagcttgcgcgtgcgctgtcgtccgcgcacgcggtcgcgggccagcgctgcttcgctgcgcagccggcgctgtccaacgaggaggagtacagtcgcttctctcaggatgctagccgggcgcatgtgacgtggcccaaggtcctgaacgccggcctggctgaggtggacccagatctcttcgacatcattgagaaggagaagaaccgccagttcaagggcctggagctgatcccctcggagaacttcgtgtctgcctcggtgatggaggcggtgggcagcgtcatgaccaacaagtacagcgagggctaccccggcgcccgctactacggcggcaacgagttcattgaccaggcagagcgcctgtgccaggagcgtgcgctgaaggcattccacctggacccggctcagtggggcgtcaacgtgcagtcgctgtcgggctcgccctccaacttccaggtgtacacggcgctgctgcagccgcacgaccgcatcatggcgctggacctgccccacggcggccacctcagccacggctaccagactgataccaagaagatcagcgccacctccatctactttgagcaaatgccgtaccgcctgaacgaggagactggcctgatcgactacgacatgctggagaagacggccgtgctgttccgccccaagctcattgtggcgggtgcctccgcctacacccgccactacgactatgcccgcatgcgcgccatcgccgacaaggtgggcgcctggctgctggcggacatggcgcacatcagtggcctggtggcggcggacctggtgccctcgcccttcggcttcgcggacgtggtcaccaccaccactcacaagtccctgcgcggtccccgcggcgccatgatcttctaccgcaagggtgtgcgccgcacggacgccaagaccggcaagcccatcaactacgacatcgaggacaagatcaacttcgccgtgttccccggcctgcagggtggcccccacaaccacaccatcgccggtctggcctgcgcgctgaagcaggcggccacccctgagttcaagtcctaccagcagcaggtgctgtccaacagccaggccctggccggcgccctggccaagcgcggcttcaagctggtgtcgggcggcaccgacaaccacatcgtgctggtggacctgcggccaaagggcgtcgacggcagccgcgtggagcgtgtgctggagctggcgcacatcgccgccaacaagaacactgtgcccggcgacgtgagcgcgctggtgcccggcggcctgcgcatgggctcgcctgccctcacctcgcgcggctttgtggagaaggacttcgagcaggtggctgagtttgtggaccgcgccgtgaacatcgcggtggacctcaagaagaagtaccccaagctcaaggagttccgcgaggccatggccaaggagtccacccccgacatcaacgcgctgaagaaggacgtggagaccttcgcgatgcgcttccccacgataggcttcgacaaggccgccatgcgctacaagaactaa

SEQ ID NO: 9952 - protein, 520 aa, Chlamydomonas reinhardtii
MQRTVQGISQLARALSSAHAVAGQRCFAAQPALSNEEEYSRFSQDASRAHVTWPKVLNAGLAEVDPDLFDIIEKEKNRQFKGLELIPSENFVSASVMEAVGSVMTNKYSEGYPGARYYGGNEFIDQAERLCQERALKAFHLDPAQWGVNVQSLSGSPSNFQVYTALLQPHDRIMALDLPHGGHLSHGYQTDTKKISATSIYFEQMPYRLNEETGLIDYDMLEKTAVLFRPKLIVAGASAYTRHYDYARMRAIADKVGAWLLADMAHISGLVAADLVPSPFGFADVVTTTTHKSLRGPRGAMIFYRKGVRRTDAKTGKPINYDIEDKINFAVFPGLQGGPHNHTIAGLACALKQAATPEFKSYQQQVLSNSQALAGALAKRGFKLVSGGTDNHIVLVDLRPKGVDGSRVERVLELAHIAANKNTVPGDVSALVPGGLRMGSPALTSRGFVEKDFEQVAEFVDRAVNIAVDLKKKYPKLKEFREAMAKESTPDINALKKDVETFAMRFPTIGFDKAAMRYKN

SEQ ID NO: 9953 - DNA, 1419 bp, Chlamydomonas reinhardtii
  CDS (1)..(1419)
atgacagcggtctttccggaggcccacacacgtctggctgtcgcggaccctgaggtcttcgcgctgatcgaggatgagaaggcgcgacagtggaagggtatcgagctgattgcttctgagaacttcacgtcgctcccagtcatggaggcgctgggctcctgcctgaccaacaagtactcagagggccagcccggcgctcgttactacggtggtaacgagaacatcgataagattgagctgctgtgcaagaagcgcgcgctggaggcctttcacgtcagcccggaggagtggggtgtcaacgtgcagccttactcgggcagccccgccaacttcgccgtgtatacggcgctgctgaacccgcacgaccgcatcatgggcctggacctgccctccggcggccacctgacccacggctactacacccagggcaagaagatcagcgccacctcgatcttcttcgagtcgctgccctacaagctgaacccccagaccggccttgtggacatggacaagctggaggagaaggcgatggagtaccggccgaagatgatcatctgcggcgcctccgcctacccccgcgactgggactatgcgcgcttccgcgagattgcggacaaggtcggcgcgctgctgatggtggacatggcacacatcagtggcctggtcgccgcgggcacgctgacgactcccttcaagtacgcggacatcgtgaccaccaccacccacaagtccctgcgcggcccccgcgccggcatgatcttcttccgccggggtgtcaagcccgttgaccgcctgctcaagggcgagacggagggcgccgcgtacgacttcgaggacaagatcaacttcgcggtgttcccctcgctgcagggcggcccgcacaaccaccagatcggcgcgctggcggtggcgctcaagtacgtggccacgcccgagttcaggcagtactcggagcaggttgtgcacaactgccgctcgctggcggacgcgctgatgaagaagggctacaagctggtgacggacggcaccgacaaccacctcatcctgtgggacctgcgccccgagggcgtgactggcagcaagatggagaaggcgtgcgacctgtgccacatcacgctaaacaagaacgcggtggtgggcgacctgtccgccatgaaccccggcggcgtgcgcattggcacgcccgccatgacctctcgcggcctgacggagggcgactggacagaggtggcggagttcctgcacgaggtgctggaggtgtgcaagcaggtgcagggcaccactggcaaggcgctcaaggatttcatcaaggggctagagggcaaccccgcgatcgccgacatccgctcgcgtgttgaggcctgggcgagccgcttccccatgccgggcttcaccgtgcctgccgccgaggccaagtaa

SEQ ID NO: 9954 - protein, 472 aa, Chlamydomonas reinhardtii
MTAVFPEAHTRLAVADPEVFALIEDEKARQWKGIELIASENFTSLPVMEALGSCLTNKYSEGQPGARYYGGNENIDKIELLCKKRALEAFHVSPEEWGVNVQPYSGSPANFAVYTALLNPHDRIMGLDLPSGGHLTHGYYTQGKKISATSIFFESLPYKLNPQTGLVDMDKLEEKAMEYRPKMIICGASAYPRDWDYARFREIADKVGALLMVDMAHISGLVAAGTLTTPFKYADIVTTTTHKSLRGPRAGMIFFRRGVKPVDRLLKGETEGAAYDFEDKINFAVFPSLQGGPHNHQIGALAVALKYVATPEFRQYSEQVVHNCRSLADALMKKGYKLVTDGTDNHLILWDLRPEGVTGSKMEKACDLCHITLNKNAVVGDLSAMNPGGVRIGTPAMTSRGLTEGDWTEVAEFLHEVLEVCKQVQGTTGKALKDFIKGLEGNPAIADIRSRVEAWASRFPMPGFTVPAAEAK

SEQ ID NO: 9955 - DNA, 1428 bp, Malassezia globosa CBS 7966
  CDS (1)..(1428)
atgtcctcggtccagattcctaacgactttaacagcgtcctgtacaagcccctctctgaggccgacccagaggtacaggaaatcatcaacaatgagacgtatcgtcagttcactggccttgagcttattgcgtctgaaaacttgacttcgctggccacgatggaagccaacggttcgatcttgacgaacaagtactcggaaggtctcccaggctcgcgttactacggtggtaacgagtacattgaccagcttgaggctcttacgcaaaagcgcgcccttgctgctttcgacctggacccgaacgtgtggggagtcaacgtgcaaccatactctggttccactgccaacttcgctgccttcacagctttgattcagccacaagaccgtgttatgggtcttggcctgccagatggtggccatcttacgcacggttactacacggctaagaagaagatcactgcttcttcaatctacttccagtctttcccttaccaggtgaagcgtgacgacgggtacattgactacgagcgtctccgtgtgaatgccaacctgtttaagcctcgtcttattgtttgtggtggttctgcatacccacgtgactgggaatataacactatcgctgagattgccaaggagcagggtgcttacctcctgtgtgatatggcgcacatctctggtctggtggctggtaaggagcagaacaatcccttcgagtactgtgatgttgtcactacgacaacgcacaagacgctccgtggcccacgtgccggtcttattttcttccgcaaggaccgtgaacctgacctcgaggctcgtgtgaatgccgccgtgttccctgcctgccaaggtggtccacacaacaacaccattgctggcattgctgttgctcttaagcaggccgctgacccagctttcaagcaatatgctaagcaagttcgtgccaacgcgcaggccattgccaagaagctggtttcttacggttaccgcctgcagacggaaggcactgacaaccacctggtgctctgggaccttcgccccatcggtctaacgggctctaagattgaaaagctttgcgaccttgtgcacattacgttgaacaagaatgccgtcgctggcgacacgtcggctgtcgtgcctggtggtgttcgtatcggtacaaatgccctcacttcgcgtagcatgaccgaaaaagatatggaccaaatcggcgagttcctccaccgtgctgttgagattgcccaggtccttcagaaagaggctggttctaagttgctcaaagacttcattgccaaggctacaactggtgaaggtgagggccgcaagatgatcctccagctagctgatgatgtcaaggcctttgccacaagcttccctctccccggcgttcctgacacgagtgtcattaagaaacctgctggcgcgcattaa

SEQ ID NO: 9956 - protein, 475 aa, Malassezia globosa CBS 7966
MSSVQIPNDFNSVLYKPLSEADPEVQEIINNETYRQFTGLELIASENLTSLATMEANGSILTNKYSEGLPGSRYYGGNEYIDQLEALTQKRALAAFDLDPNVWGVNVQPYSGSTANFAAFTALIQPQDRVMGLGLPDGGHLTHGYYTAKKKITASSIYFQSFPYQVKRDDGYIDYERLRVNANLFKPRLIVCGGSAYPRDWEYNTIAEIAKEQGAYLLCDMAHISGLVAGKEQNNPFEYCDVVTTTTHKTLRGPRAGLIFFRKDREPDLEARVNAAVFPACQGGPHNNTIAGIAVALKQAADPAFKQYAKQVRANAQAIAKKLVSYGYRLQTEGTDNHLVLWDLRPIGLTGSKIEKLCDLVHITLNKNAVAGDTSAVVPGGVRIGTNALTSRSMTEKDMDQIGEFLHRAVEIAQVLQKEAGSKLLKDFIAKATTGEGEGRKMILQLADDVKAFATSFPLPGVPDTSVIKKPAGAH

SEQ ID NO: 9957 - DNA, 1440 bp, Physcomitrella patens subsp. patens
  CDS (1)..(1440)
atggaccagtggccgaagcaactgaatgccgacatctccgaggttgaccccgagattgtcgacatcatcgaacatgagaagaaccgtcaatacaagggtctggagttgatcccatcagaaaacttcacctccctctcagttatgcaggcagtggggtcagtcatgaccaacaagtacagtgagggttaccccggggctcgttactacggtggcaacgagtacattgatatggctgaaagattgtgccaaaagagagcacttgctgctttccgtctcgaccccgagaaatggggagtgaacgtgcagtccctgtctggatcgccagcaaactttcaggtgtacacagctctcctgaagccacatgagcggatcatggcgttggatcttcctcatggtggccacttgtctcatggatatcagactgatacaaagaagatttcagccgtttccattttcttcgagactatgccctacagactgaacgagtccacaggttatatcgactatgatcagatggagaagagcgcaacactcttcagaccaaagttgatagtcgctggtgctagtgcttatgcccgccattacgactacgctcgcatgcgccaggtttgtgacaagcaaaaggcgattctgctcgccgacatggcccatatcagtggacttgtagcaggtggcgttgtcccatctccctttgactatgccgatgttgttaccaccacgactcacaagtctctccggggacctcgaggtgcgatgatcttctaccgtaagggtctgaaggagacaaccaagaagggtgaacaggtgttctacgattatgaagataagatcaatgcatccgttttccctggacttcagggaggtccccacaaccataccatcactggtcttgctgttgccctgaagcaggctgctactcccgaattcaaagcttatcaggaacaagttttgaggaactcagcacattttgctaaggctttgatgggccggggttacgagctggtgtccggtggaacagagaaccacttggttcttgttaacctcaagcccaagggtgtggacggttcaagggtggagcgagtgatggagcttgcccacattgcagcaaacaagaacactgttccaggagatgtgtctgcattggtacctggaggtatccgtatgggaaccccggctttgacaagcagagggtttaccgaggaagattttgagaaggttgctgagtacttcgaccgtgcagtggagatcgccgtgaaagtcaagaagtccacagcgttatttcctgtggcaggtacgaagttgaaggacttcaggaacgttgtcgacaccgaccctgaggttcaggctgaaattggaaagttgaagcacgaggtggaagagttcgcgaagcaattccccactattggtttcgagaagtcgtcaatgaagtacaagaactag

SEQ ID NO: 9958 - protein, 479 aa, Physcomitrella patens subsp. patens
MDQWPKQLNADISEVDPEIVDIIEHEKNRQYKGLELIPSENFTSLSVMQAVGSVMTNKYSEGYPGARYYGGNEYIDMAERLCQKRALAAFRLDPEKWGVNVQSLSGSPANFQVYTALLKPHERIMALDLPHGGHLSHGYQTDTKKISAVSIFFETMPYRLNESTGYIDYDQMEKSATLFRPKLIVAGASAYARHYDYARMRQVCDKQKAILLADMAHISGLVAGGVVPSPFDYADVVTTTTHKSLRGPRGAMIFYRKGLKETTKKGEQVFYDYEDKINASVFPGLQGGPHNHTITGLAVALKQAATPEFKAYQEQVLRNSAHFAKALMGRGYELVSGGTENHLVLVNLKPKGVDGSRVERVMELAHIAANKNTVPGDVSALVPGGIRMGTPALTSRGFTEEDFEKVAEYFDRAVEIAVKVKKSTALFPVAGTKLKDFRNVVDTDPEVQAEIGKLKHEVEEFAKQFPTIGFEKSSMKYKN

SEQ ID NO: 9959 - DNA, 1422 bp, Physcomitrella patens subsp. patens
  CDS (1)..(1422)
atgaaacagtggccgaagcagctcaatgccgacatctccgaggttgatcccgagatcactgacatcattgaacacgagaagaatcgtcaatggaagggacttgagctgatcccgtcagagaattttacgtccgtatcagttatgcaggcagtgggttcagtcatgaccaataagtacagtgaaggttaccccggtgctcgctattacggtggcaacgagttcattgacatggctgaaagactgtgtcaaaaaagagctctcgcagctttccgcctcgatccagagaaatggggagtgaatgtgcagtctctctctgggtccccagccaattttcaggtctacacagctctcttaaagccacacgagcgcataatggccttagatcttcctcatggtggtcatttgtctcatggatatcagacggacatgaagaaaatctcggcggtttccattttcttcgagactatgccataccgattggacgagtctacaggttacatagactacgatacgatggagaaaagcgcagttctttacaggccaaaattgatagtagctggtgccagtgcctatgctcgccattacgactatgctcgtatgcgcaaggtttgtgacaagcaaaaagctattctgcttgctgatatggcccacatcagtggcctggtagccgctggcgtcgtcccgtctcccttcgacttcgcggacgtggtaactaccactacccacaagtctcttcgaggccctcggggggccatgatcttctaccgcaaagggttgaaggagacaaacaagaagggtgaacagattttctacgactatgaagacaaaattaatgctgctgtttttccaggactacaagggggtcctcacaaccacaccattgcaggacttgctgttgccttgaaacaggcagctacgccagagttcaaggcgtaccaggaacaagttctgagcaactctgcacgttttgccaaggccttgatgagccaaggttacgagctggtgtccggtggaacagagaaccatttggtgttagtgaacctcaaacccaagggtgtggacggctctagagtggagcgagtgatggagcttgctcatattgcggcaaacaaaaacactgttcctggagatgtatctgctctagtacctggaggcattcgcatgggaacccctgctttgacaagcagaggcttcatagaggaagatttcgagaaagttgctgagttctttgaccgagcggttggaatcgctgtgaaggtcaagaagtccacaggtgcaaagttgaaggactttagggcagctgtggacactgatcccgagatccaggcagaaattggaaagttgagaactgaagttgaagaatttgccaagcagttccccacaataggctttgaaaagtcctccatgaagtaccaaaattag

SEQ ID NO: 9960 - protein, 473 aa, Physcomitrella patens subsp. patens
MKQWPKQLNADISEVDPEITDIIEHEKNRQWKGLELIPSENFTSVSVMQAVGSVMTNKYSEGYPGARYYGGNEFIDMAERLCQKRALAAFRLDPEKWGVNVQSLSGSPANFQVYTALLKPHERIMALDLPHGGHLSHGYQTDMKKISAVSIFFETMPYRLDESTGYIDYDTMEKSAVLYRPKLIVAGASAYARHYDYARMRKVCDKQKAILLADMAHISGLVAAGVVPSPFDFADVVTTTTHKSLRGPRGAMIFYRKGLKETNKKGEQIFYDYEDKINAAVFPGLQGGPHNHTIAGLAVALKQAATPEFKAYQEQVLSNSARFAKALMSQGYELVSGGTENHLVLVNLKPKGVDGSRVERVMELAHIAANKNTVPGDVSALVPGGIRMGTPALTSRGFIEEDFEKVAEFFDRAVGIAVKVKKSTGAKLKDFRAAVDTDPEIQAEIGKLRTEVEEFAKQFPTIGFEKSSMKYQN

SEQ ID NO: 9961 - DNA, 1749 bp, Physcomitrella patens subsp. patens
  CDS (1)..(1749)
atggctgcggcgctgagctcgtcctgctcgcccgcgtcccgcttgtgtggctgtgtgtcggtggggtccagccctgggtcttcgaaggtttcgcatgtccaattaccgcattcccttcggtctgcggaggtgcaggccctcggagctgtgaatttggcgcccgcttctgtttatcgtcgccggcctctcgtggtgtgcgccagtgcggcggcaccagtgtccgttcccgaaggagctacgcgatttgtcgaccctccgttgtcggaaatcgaccccgatgtgcacgcgattattgagtgcgagaagcgaaggcagtttcggggcctggagctcatcgcatcggagaacttcacgtcgcgtgcggtcatggaggctgttgggtcttgtctgacgaacaagtactcggagggcttgcctggcaagaggtattatggtgggaacgagtacattgatcagagcgaaaggttatgccagcaacgagcattgaccgcattccatgtggatgaaaaggaatggggagtgaacgtccagccactgtctgggtccccggccaactttgcagtatatactgctcttcttcagccgcacgatcgtatcatggggttggacttagcacatggagggcatctgacgcacgggtttatgaccccgaagagacgggtgtctgccacttcagtgtacttcgagtcaatgccgtaccgcctgaacgaaaccacgggactggtggattacgatatcttgcaacagacggccttgttgttccggccgaagctgatcatagcgggagcaagtgcttacgctcgtgatttcgactacccacgtatgcggaagattgcggacagcgtgggagcttttctgatgatggacatggcccacattagtgggcttgttgcagccggtgttctaagcaacccgtttgagtactgcgacgtcgtgaccaccactacccacaaatctttgaggggtccaagaggagggatgatcttctaccggaaaggagaggtgaatggaatcgatctggaaaacgccatcaacaatgctgttttcccgggtcttcagggtggtccgcacaatcataccatcggaggactcgccgtatgcctgaagcaagctgctaccccagagtttaagacttatcaacagcaggttgtgaagaactgtcgtgctttggcagatagattgatggagctggggtacaagcttgtgtcaggagggactgacaatcacctggtgctggttgacctccgacccatgggtgctgatggtgcgcgggcagagaaggtgctggatttggcatccatcacgctgaacaagaattctgttcctggagacaagagtgcgatcaaccccggtggagttcgaattggctcaccggctcttaccacgcgaggtcttggggaagcggagtttgtgaaggtggcaaacttcatccacgagggtatccaaatcacagtgaaggcaaaggagacgtgtccagggacgaagatcaaggattttctggagtacgtggagtcggagagctgcgaacaacgtggtgcgattctggatctacgaaaacgggttgaagcatttgcgacccagtaccccatcccaggggttggcacagagatttttggtgagagagttagcagagcagaaaagctccgtgaaggaaatggcatcccttggcacttgatagagcaggacgtgatagtcgccgggacggcattcgtttggagaacagcagcatgttcaatggtagcgctgtag

SEQ ID NO: 9962 - protein, 582 aa, Physcomitrella patens subsp. patens
MAAALSSSCSPASRLCGCVSVGSSPGSSKVSHVQLPHSLRSAEVQALGAVNLAPASVYRRRPLVVCASAAAPVSVPEGATRFVDPPLSEIDPDVHAIIECEKRRQFRGLELIASENFTSRAVMEAVGSCLTNKYSEGLPGKRYYGGNEYIDQSERLCQQRALTAFHVDEKEWGVNVQPLSGSPANFAVYTALLQPHDRIMGLDLAHGGHLTHGFMTPKRRVSATSVYFESMPYRLNETTGLVDYDILQQTALLFRPKLIIAGASAYARDFDYPRMRKIADSVGAFLMMDMAHISGLVAAGVLSNPFEYCDVVTTTTHKSLRGPRGGMIFYRKGEVNGIDLENAINNAVFPGLQGGPHNHTIGGLAVCLKQAATPEFKTYQQQVVKNCRALADRLMELGYKLVSGGTDNHLVLVDLRPMGADGARAEKVLDLASITLNKNSVPGDKSAINPGGVRIGSPALTTRGLGEAEFVKVANFIHEGIQITVKAKETCPGTKIKDFLEYVESESCEQRGAILDLRKRVEAFATQYPIPGVGTEIFGERVSRAEKLREGNGIPWHLIEQDVIVAGTAFVWRTAACSMVAL

SEQ ID NO: 9963 - DNA, 1545 bp, Aspergillus oryzae RIB40
  CDS (1)..(1545)
atgctgagccgctgtggtcgccaggctttgcgattgatcccgcgcacgggaagctcttccagagctatcgccatcactactcaactccgaccggctgctcccttgtgtgtctccagctcaatttctcagagccggagtgtgtcatcctccagtcgtgatggacagcaacatgagaaaaaacgtcaaaagcactttatcaacctgatcccttcggagaacttcacttcacaagcggtccttgatgccctgggcagtgtgatgcaaaacaagtattcagagggttatcccggtgccagatactacggaggaaatgagcacatcgacgagtcggagaggttatgtcaacagcgtgccttggagaccttccggctcaatcccgaagaatggggcgtgaatgttcaaccactttccggctctcccgcgaacttgtatgccatctccgcccttctcaacacgcatgaccgcctgatgggcctggacttgcctcatggtggtcacttgtcacatggttatcagacacccaccaagaagatttcattcatctcgaaatactttgagacccttccttaccgccttgatgagtcgactggtctcattgattacgacgccctcgagaagcaggcgttgctctatcgtccaaagctcattattgccggtacttcggcctatagccgattaatcgactaccctcggatgcgccagatcgcagacgcagctggtgcataccttctcagtgacatggcccacatatctggactggttgctgcggatgtacttccctcgcctttcactcactctgatgtggtaacaacgactactcacaagtccctgcgtgggccccgtggtgccatgatcttctaccgcaagggtgtccgccggacggacaagaagggcaacccggagatgtacgacttagagaatcctatcaatgcctccgtcttcccgggccaccagggtgggcctcataaccacaccattactgctctagcagttgcactgaagcaggcccagtcaaccgagttcaagacttaccaggaaaccgtcttagccaacgctaaggcattggctgaccgacttggcagccctctcagcaatgggggtttgggatacaacattgtgtccggtggaacggataaccacctggtcctcgtggatctgaagaaccgtggggttgatggagcccgtgttgaacgtgttctagagctctgcggcgttgctagcaacaagaacaccgttccgggagatcggtcggctttgaagcccggtggtctccgcctgggtactcctgccatgactacccgtggcttccagcccgaggacttccgccgcgtggccgatatcgttgatcgcgcggtcattatcacccaaaagctggacaaggctgccaaggagagcgctgcggctaagggcgttaagaacccgaacactgtcaaggccttcctggaatatgttggtgagggtgaggagatttcagagattgtgctcttgcggcaggaagttgaggactgggtgggaactttcagcctcccttggaaggacgagtaa

SEQ ID NO: 9964 - protein, 514 aa, Aspergillus oryzae RIB40
MLSRCGRQALRLIPRTGSSSRAIAITTQLRPAAPLCVSSSISQSRSVSSSSRDGQQHEKKRQKHFINLIPSENFTSQAVLDALGSVMQNKYSEGYPGARYYGGNEHIDESERLCQQRALETFRLNPEEWGVNVQPLSGSPANLYAISALLNTHDRLMGLDLPHGGHLSHGYQTPTKKISFISKYFETLPYRLDESTGLIDYDALEKQALLYRPKLIIAGTSAYSRLIDYPRMRQIADAAGAYLLSDMAHISGLVAADVLPSPFTHSDVVTTTTHKSLRGPRGAMIFYRKGVRRTDKKGNPEMYDLENPINASVFPGHQGGPHNHTITALAVALKQAQSTEFKTYQETVLANAKALADRLGSPLSNGGLGYNIVSGGTDNHLVLVDLKNRGVDGARVERVLELCGVASNKNTVPGDRSALKPGGLRLGTPAMTTRGFQPEDFRRVADIVDRAVIITQKLDKAAKESAAAKGVKNPNTVKAFLEYVGEGEEISEIVLLRQEVEDWVGTFSLPWKDE

SEQ ID NO: 9965 - DNA, 1443 bp, Coprinopsis cinerea okayama7#130
  CDS (1)..(1443)
atggcatcccaaaacacaccagctttcaacaagattctctacgctcctttggcagagatcgacccagaggtcaaaaatatcatcgacaaggagacatggaggcagttcactggactcgagcttattgcttcagagaacttgaccagccaggccaccatggaggccaatggctcaattctcaccaacaaatactctgagggtctccccaatgctcgttactacggtggtaacgagtacattgacgaactcgagctcctttgccgaaagcgtgcccttgaggccttccacctcgatgcctccaagtggggtgtcaatgtccagccctactctggcagtactgcaaactttgctgctcttaccgctttgatccaaccccaggaccgactcatgggtctcggtctccccgacggtggccatctcacccacggttactacaccgccaaaaagaagatgaccgcctcctccatctacttccagtccctcccctacggtatcatccctgagagcggcctcatcgactacgacaagctcgaggcccaagctaaaatctacaagccccgactcatcatctgcggtgcctctgcctacccccgtgactgggactatgctcgtctccgccagattgctgacaaggagggcgcttggttgatggctgatattgcccacaccagtggtctcattgctgcccaggagctcaacagccccttcgactactgtgacgttgtcaccaccaccacccacaagacccttcgtggccctcgtgctggcctcatcttctacaggaaggatctcgagaacgccaaggacctcgagaagcgcgtcaacgacgccgtcttccctgcctgccagggtggtcctcacaacaacaccatcgctgctattgctaccgccctcaagcaggtcgcctcccccgaatggaaggcctacgccaagcaggtcgtcgccaatgcccgcgccctcgctgagaccctcgtcggtcacggctacaagctccaaactggcggtaccgacaaccacctcgtcctctgggacctccgccccatcggcctcaccggctccaaggtcgagaaggtctgcgacctcatgggtatcaccatcaacaagaacgctgtctccggtgacgcctctgctcaagtccccggcggtatccgtttgggtacctccgcgctcacctcgcgtgacatgcgcgaggaggacgtcaagcaggtcgccgagttcttgcaccgtgctgtgcagatctccttgactctccagaaggaggccggcaccaagttgttgaaggactttgtccgtgttgctaccaccaaggaggagggcaaggttggatatgagcaggtcagccaactgagggaggaggttcaggcctttgccaagaggttccctctccctggtgtcgatacccagaacctgcagaggcccgagggtttgcatgagtaccactaa

SEQ ID NO: 9966 - protein, 480 aa, Coprinopsis cinerea okayama7#130
MASQNTPAFNKILYAPLAEIDPEVKNIIDKETWRQFTGLELIASENLTSQATMEANGSILTNKYSEGLPNARYYGGNEYIDELELLCRKRALEAFHLDASKWGVNVQPYSGSTANFAALTALIQPQDRLMGLGLPDGGHLTHGYYTAKKKMTASSIYFQSLPYGIIPESGLIDYDKLEAQAKIYKPRLIICGASAYPRDWDYARLRQIADKEGAWLMADIAHTSGLIAAQELNSPFDYCDVVTTTTHKTLRGPRAGLIFYRKDLENAKDLEKRVNDAVFPACQGGPHNNTIAAIATALKQVASPEWKAYAKQVVANARALAETLVGHGYKLQTGGTDNHLVLWDLRPIGLTGSKVEKVCDLMGITINKNAVSGDASAQVPGGIRLGTSALTSRDMREEDVKQVAEFLHRAVQISLTLQKEAGTKLLKDFVRVATTKEEGKVGYEQVSQLREEVQAFAKRFPLPGVDTQNLQRPEGLHEYH

SEQ ID NO: 9967 - DNA, 1404 bp, Culex quinquefasciatus
  CDS (1)..(1404)
atgtccggcaacgcgaagctgctgcacgagaacctgtggcaggccgatccagagctgatggatctggtccggaaggagaagaagcgccagatccagggcctggagatgatcgccagcgagaactttacctcgctgtcggtgctacagtgtctgagctcgtgcctgcacaacaagtattccgagggactgcccggccagagatactatggtggcaacgagtacatcgacgaaatcgaactcctcgcccaaaagcgtgccctcgaggcgtaccggctgaatccggaggagtggggttgcaacgtgcagccgtactcgggttcgccggccaactttgccgtgtacaccgggttgatcgaaccgcacgggcgcatcatggggctggacctgcccgatggtggccacttgacgcacggtttcatgacggcgaccaaaaagatctccgccacgtccatcttcttcgagagcatgccgtacaaggtcgatccggtgacggggctgatcgattacgacaagctggaggaaagtgcgcggatattcaagccgaagatcatcatcgcgggcatttcgtgctactcgcggtgtctggactacaagcgcttccggcagattgccgacgccaacggggcttacatgtttgcggacatggcgcacatttccgggctggtcgcggccggagttattccatcgccgtttgagtttgcggatgtggttagtacgaccacgcacaaatcgctccgtggaccacgtgctggagtgatcttctaccgcaagggggtgcgcagtgtcaaggcgaacggggagaaggtgctgtacgacttggagagcaagatcaaccaggcggtgttcccgggtctgcagggaggaccacacaaccacgccatcgccggaatcgccacctgcatgctgcaagcccagacgccggagttcaaagaataccaggtgcagatcatcaaaaacgcccgtgccctctgcgacggcctgctgcagaagggttacaccatctcgaccggtggaaccgacgtccacctggtgctcgttgacctgcgtccggtcggtatcaccggagctcgcgccgaatacgtcctcgaagaaatatcgatcgcgtgcaacaaaaacaccgtccccggcgacaagagcgccctcaacccgtccggaatccggctgggaacgccggcgctgaccacgcgtggcctcaccgagtcggacatggcccgggtggtggactttatcgatcggggtctgcagctgtcgaaggaaatcaccgccgtgtccggaccgaagctggccgactttaagcgagtgctgcacgaagatccgaagcttaatggcaaggtgcaagccctcaagaaggaggtccaagactacagcgaaaagttcccgatgcccggctacgaggagttctga

SEQ ID NO: 9968 - protein, 467 aa, Culex quinquefasciatus
MSGNAKLLHENLWQADPELMDLVRKEKKRQIQGLEMIASENFTSLSVLQCLSSCLHNKYSEGLPGQRYYGGNEYIDEIELLAQKRALEAYRLNPEEWGCNVQPYSGSPANFAVYTGLIEPHGRIMGLDLPDGGHLTHGFMTATKKISATSIFFESMPYKVDPVTGLIDYDKLEESARIFKPKIIIAGISCYSRCLDYKRFRQIADANGAYMFADMAHISGLVAAGVIPSPFEFADVVSTTTHKSLRGPRAGVIFYRKGVRSVKANGEKVLYDLESKINQAVFPGLQGGPHNHAIAGIATCMLQAQTPEFKEYQVQIIKNARALCDGLLQKGYTISTGGTDVHLVLVDLRPVGITGARAEYVLEEISIACNKNTVPGDKSALNPSGIRLGTPALTTRGLTESDMARVVDFIDRGLQLSKEITAVSGPKLADFKRVLHEDPKLNGKVQALKKEVQDYSEKFPMPGYEEF

SEQ ID NO: 9969 - DNA, 1506 bp, Laccaria bicolor S238N-H82
  CDS (1)..(1506)
atgttgagattattaggacgacccattctccgcacgcccatctcacgtcaactagttttcagaaaaatggccacagcgaataccccagatttcaacaaggttctctacactcctttggcggagatcgacccagaggtcaagaatatcatcgataaggagacatggagacagttcactggcctcgagcttattgcctccgaaaacttgaccagcagggctaccatggaggccaatggctcaattctgaccaacaagtattccgaaggtctcccgaacgccaggtactacggtggcaacgagtatatcgatgaacttgaagttctttgccgcaaacgtgccctccaagcttttaaccttgaccctcttaaatggggcgtcaacgttcagccatattctggtagtaccgccaactttgcggctctcaccgcacttatccagcccaatgaccgtctcatgggtctgggccttcccgacggtggacatcttacccacggatactacactgcaaagaagaagatgactgcgtcgtcaatttacttccagtctttcccttatgccatcactcccgaaaccaatttgattgactatgctgggctcgcctcacaagccaagatcttcaagccccgcttgattatttgtggtgcctcggcttaccctcgtgactgggattacaagaacctcaaggataccgctacaagggaaggtgcctggctcatggcagatattgcacacaccagtggtcttgttgctgcccaggagttgaataatccgttcgaatactgtgatgtcgttaccacgacaacccacaagactctccgtggtcctcgtgctggtctcatcttcttcaggaaggatctcgagtatgcgaaagacctcgagaagcgcgtcaatgacgccgtcttccctgcttgccagggtggaccccacaacaacaccatcgctgctatcgccacagccctgctccaggtcgcccaacccgaattccgtgcttatgccaaacaggtcatctcaaacgcccagaccctcgcgtcatcgctcatcgagcatggctacaggttgcaaactggtggcaccgacaaccatctcgtcctgtgggacttgcggcccattggtttgacgggcagcaaagttgaaaaggtctgcgatctcatgggcatcaccatcaacaagaatgctgtttctggtgacgcctctgcccaagtgccaggcggcatccgtcttggcacctctgccctcacttctcgtgatatgaaggaggctgatatcaagaaggtcgctgaattcctccaccgcgccgttcaactctccctgctcctccaaaaagaggccggatcgaagctcctcaaagacttcgtccgcgtagccactactcaggaggcgggcaaagagggctacgcaaaggtgaaggagctgcgcgacgaggtccaatctttcgccagcgcattcccactccctggtgtggatgtctccgcgctgaaaaagcctgagggtctccatgagtattaa

SEQ ID NO: 9970 - protein, 501 aa, Laccaria bicolor S238N-H82
MLRLLGRPILRTPISRQLVFRKMATANTPDFNKVLYTPLAEIDPEVKNIIDKETWRQFTGLELIASENLTSRATMEANGSILTNKYSEGLPNARYYGGNEYIDELEVLCRKRALQAFNLDPLKWGVNVQPYSGSTANFAALTALIQPNDRLMGLGLPDGGHLTHGYYTAKKKMTASSIYFQSFPYAITPETNLIDYAGLASQAKIFKPRLIICGASAYPRDWDYKNLKDTATREGAWLMADIAHTSGLVAAQELNNPFEYCDVVTTTTHKTLRGPRAGLIFFRKDLEYAKDLEKRVNDAVFPACQGGPHNNTIAAIATALLQVAQPEFRAYAKQVISNAQTLASSLIEHGYRLQTGGTDNHLVLWDLRPIGLTGSKVEKVCDLMGITINKNAVSGDASAQVPGGIRLGTSALTSRDMKEADIKKVAEFLHRAVQLSLLLQKEAGSKLLKDFVRVATTQEAGKEGYAKVKELRDEVQSFASAFPLPGVDVSALKKPEGLHEY

SEQ ID NO: 9971 - DNA, 1455 bp, Brugia malayi
  CDS (1)..(1455)
  misc_feature (870)..(870): r is g or a
atgaacacctgctttttaccacttacagcgctcaaaggaatagaacgaatgcattattctggaagaaatatgctgaaggattcattgagtattgctgatcccgaagcttataaaatcatgcaaaaggaaaaggaaaggcagaaacgaggactggaactaattgcaagtgaaaatttcacttcgaaagctgttcatgatgcattaggctcttcaatgtcaaataaatattcagaaggctatcctggtatcagatattacgcagggaatgaatttattgatgaaatggaaatattatgtcgaagtcgtgctcttcaggtatttggtttggatgataagaagtggggtgtcaatgtgcaagccctctcaggttcaccagcaaattttgctgtttataccggcttgctggaaccaaatgggcgaattatgggtttggatttgcctgatggtggacatttgacccatggattctttacacctcgacgaaaagtttcatcgtcgtccttatttttccagtcgatgccttacaaagttgatgccaaaactggttacatcgattacaatcaactagagtacactgcattactatttcgtccaaatattattgtagcgggaacaagttgttattcacgcttgctagactacagtcgcttccgtaagatagctgataaatgtggtgcttatttattggctgatatggcacatatttcgggtctggttgctgcaaatgtcattccatcaccttttgaatatgctgatgtcatcacaacaacgactcacaaatcacttcggggtcctcgtggggctttgattttttacaggaaaggcttgaagaaaataactccaaaaggtgagaaagtgatgtatgatttrgaacaaaggatagattctgccgtatttccgggattgcaaggaggacctcataatcatacaatagcgggcattgctgttgctttaaatcagtgtcttacagaagattttattcaatattgcaagcagattttgtcaaactctcgaacacttgcaaatagattggtggaacttggctatactttggttacagggggaactgatactcatctctgcttggttgatttacgtccaaaaggtttggatggtgcgaaagtggaacatgtcctcagtttagctaatattatttgcaatcgtaatacttgtccaggagaccagagcgctctacatcccagcggtatacgtcttggaacaccagctcttactacacgaggaatgaaagaaaatgatttcgttagggttgccgattttattcatgaaggagtggaaattttggtaaaatatgagtcgcaggtgggcaaaacactaaaagacttgacagtgtttaccagttcgaatgagcagtttatagcagatattaataagttaggggaaaaagtggagcagttcgctagtcgtttcgatatgccggggaacgatgatatttaa

SEQ ID NO: 9972 - protein, 484 aa, Brugia malayi
MNTCFLPLTALKGIERMHYSGRNMLKDSLSIADPEAYKIMQKEKERQKRGLELIASENFTSKAVHDALGSSMSNKYSEGYPGIRYYAGNEFIDEMEILCRSRALQVFGLDDKKWGVNVQALSGSPANFAVYTGLLEPNGRIMGLDLPDGGHLTHGFFTPRRKVSSSSLFFQSMPYKVDAKTGYIDYNQLEYTALLFRPNIIVAGTSCYSRLLDYSRFRKIADKCGAYLLADMAHISGLVAANVIPSPFEYADVITTTTHKSLRGPRGALIFYRKGLKKITPKGEKVMYDLEQRIDSAVFPGLQGGPHNHTIAGIAVALNQCLTEDFIQYCKQILSNSRTLANRLVELGYTLVTGGTDTHLCLVDLRPKGLDGAKVEHVLSLANIICNRNTCPGDQSALHPSGIRLGTPALTTRGMKENDFVRVADFIHEGVEILVKYESQVGKTLKDLTVFTSSNEQFIADINKLGEKVEQFASRFDMPGNDDI

SEQ ID NO: 9973 - DNA, 1635 bp, Podospora anserina DSM 980
  CDS (1)..(1635)
atgacgacaatcccggcgttgcggagcgccgccggcggttccccctcggctgcgatgatgagaaggatgatagccaccaccaccacgacggccacgatgacgaggagggcgggacagcttgggggatggatgtcaagacagcagcagcagcagcagaaaagattggtttcgtcgttagggaatgatacgcagcagaagttgcttgcggcgcatttgcagcaggcggatccgatcatgtatgatattgtcgagaaggagaaagtcaggcaaaagcagttcatcaacttgatcccttccgagaactttacctcgcaggctgtgctggatgcgctggggagtcctatgcagaacaagtactctgagggatacccgggtgcgagatactacggcggtaacgagttcatcgatgcctccgagagattatgccagcagcgcgcactcgagacgttcggactggatgccaaggagtggggggtgaatgttcaagctctctctggtgcgccagcgaacctgtatgtctactcagccatcatggaaactcatgatcggttgatgggtctcgatctcccccacggcggccatctttcccacgggtaccagacccccaccaagaaaatctcgttcatctccaagtacttcgagacggttccttaccgacttgacgagtccaccggcctgatcgactacgataagctcgaggagctggcaaccatctaccgccccaaggttatcgtcgctggcgcctcggcctacagcaggcaaatcgattatgctcgtatgcgggacatcgccgacaaggtgaaggcctaccttgtggctgacatggctcatatctccggtcttgtcgccgccaaggtcatgcccgggccgtttggctacgcagacattgtcacgacgacttctcacaaatccctccgtggcccccgtggcgcgctgattttcttccgccgcggtgtgaggaaggtcaacccgaagaccggagcggaggagctgtacaacctcgagaaccccatcaaccaatccgtgtttcccggccaccagggcggtccgcacaaccacactattgccgccttggccgtggcgctcaagcaggcacaaacaccagagttcagggcgtatcaatcgcaggtcttgtccaatgccaaagccttctccaagaggctgggtgaaccaaaggaaaagggcgggctgggctacaagattgtctcgggcggtactgataaccatcttgttcttgtcgatctgaagccgcacggtgtggacggggcgagagtggaacggatcctggagttggtcggggtagcttccaacaagaacactgttccgggtgacaagagcgcgttgacgcctggtgggttgaggatgggaactccggccatgacgacgagaggattccaggaggaggactttgcgcgggtagcggatattgtcgataggtcggtgacgattgcggtcagggtggacaaggcggcgaggaaggcggctgaggaaaagggggaggggaagacggcggggagggtgaagacctttatggagtttttgggggatggggagacggacacggagattgtgcagttgaggagtgaggtggcggattgggtggggacgtatcctgttccttgggaggggaagtaa

SEQ ID NO: 9974 - protein, 544 aa, Podospora anserina DSM 980
MTTIPALRSAAGGSPSAAMMRRMIATTTTTATMTRRAGQLGGWMSRQQQQQQKRLVSSLGNDTQQKLLAAHLQQADPIMYDIVEKEKVRQKQFINLIPSENFTSQAVLDALGSPMQNKYSEGYPGARYYGGNEFIDASERLCQQRALETFGLDAKEWGVNVQALSGAPANLYVYSAIMETHDRLMGLDLPHGGHLSHGYQTPTKKISFISKYFETVPYRLDESTGLIDYDKLEELATIYRPKVIVAGASAYSRQIDYARMRDIADKVKAYLVADMAHISGLVAAKVMPGPFGYADIVTTTSHKSLRGPRGALIFFRRGVRKVNPKTGAEELYNLENPINQSVFPGHQGGPHNHTIAALAVALKQAQTPEFRAYQSQVLSNAKAFSKRLGEPKEKGGLGYKIVSGGTDNHLVLVDLKPHGVDGARVERILELVGVASNKNTVPGDKSALTPGGLRMGTPAMTTRGFQEEDFARVADIVDRSVTIAVRVDKAARKAAEEKGEGKTAGRVKTFMEFLGDGETDTEIVQLRSEVADWVGTYPVPWEGK

SEQ ID NO: 9975 - DNA, 1416 bp, Pyrenophora tritici-repentis Pt-1C-BFP
  CDS (1)..(1416)
atgtctagctacgcgcttcccaagtcccaccaggacctcatggagaagtccctggtggacactgacaatgaggtcgctcaaatcatggagaaggaaattcagcgtcaacgcgagtccatcctcctcatcgcctccgagaatgttacctcccgcgccgtctttgatgcgctcggttcgcccatgtccaacaagtactctgagggttaccccggtgccagatactacggtggcaacgagcacattgactccatcgaactgctctgccagaagcgcgctcttgagacctttggtcttgactcggagaagtggggtgtcaacgtacaatgcttgagcggtagcccggcaaacttgcaggcataccaagccatcatgaggccacacgacaggctgatgggtcttgatctgccccacggtggtcacttgagccacggttaccagacaccgcagaggaaaatctccgctgtttccacatacttcgagacgttcccctaccgcgtaaacctcgagactggcctcatcgactacgaccagctcgagcagaacgccctcatgtaccgccccaaggtcctcgttgccggtacctccgcctactgccgtgagatcgactatgcccgcatgcgcgagattgctgacaaggtcggctgctacctgttgatggacatggcccatatctctggtcttgtcgctgctggtgttaacaagtcgcccttcccatactgcgacattgtcaccaccacgacccacaagtcccttcgtggaccccgtggtgccatgatcttcttccgcaagggcgtgcgcaagaccgatgccaagactggcaaggagaccctatatgacctcgagggacccatcaacttctccgtcttccctggtcaccagggtggtccccataaccacaccatcaccgcgcttgctgttgcgcttaagcaagcccagaccgaggacttcaagctctaccagcaacaagtcatcaagaacgcaaaggcacttgaggttgccttcaagaagatggactacaagctcgtcactgacggcactgacaaccacatggtcctcctggacctcaagccctttgccctcgacggtgcccgtgttgaggccgttctcgagcaggtaaacattgcctgcaacaagaacaccacccctggtgacaagtccgcacttacgcctatgggtatccgtattggagcaccagccatgacatcgcgtggtctgggtgaggatgacttcaagaagattgccaactacatcgactcatgcatcaaactatgcaagaagatccagagcgagctccccaaggagaacaacaagctcaaggacttcaagaacaaggtcgcatccggcgaggtgcaagagatcaacgacctgaagaaggagattgcggcctgggccgtcactttcccccttcccatctaa

SEQ ID NO: 9976 - protein, 471 aa, Pyrenophora tritici-repentis Pt-1C-BFP
MSSYALPKSHQDLMEKSLVDTDNEVAQIMEKEIQRQRESILLIASENVTSRAVFDALGSPMSNKYSEGYPGARYYGGNEHIDSIELLCQKRALETFGLDSEKWGVNVQCLSGSPANLQAYQAIMRPHDRLMGLDLPHGGHLSHGYQTPQRKISAVSTYFETFPYRVNLETGLIDYDQLEQNALMYRPKVLVAGTSAYCREIDYARMREIADKVGCYLLMDMAHISGLVAAGVNKSPFPYCDIVTTTTHKSLRGPRGAMIFFRKGVRKTDAKTGKETLYDLEGPINFSVFPGHQGGPHNHTITALAVALKQAQTEDFKLYQQQVIKNAKALEVAFKKMDYKLVTDGTDNHMVLLDLKPFALDGARVEAVLEQVNIACNKNTTPGDKSALTPMGIRIGAPAMTSRGLGEDDFKKIANYIDSCIKLCKKIQSELPKENNKLKDFKNKVASGEVQEINDLKKEIAAWAVTFPLPI

SEQ ID NO: 9977 - DNA, 1602 bp, Drosophila ananassae
  CDS (1)..(1602)
atgcagaaagtacgctgcttgtcattgccacaaaagcttctctactgcttaagccgagacgtgaacacaaaagccggtaacttcgccggagaacagctgatcggagctttaactcgcgtcgctgccgccaaaaatccaacatccacattctccccgatcagacgatactcgtacagcacggaaaacacttctaggaaaatgtcggatcagaagatgctgcaggccacattggaggagggtgatcccgagttggcggatctcattaagaaggagaaggagcgtcagctggaaggactcgagatgattgccagtgagaacttcacatccgtgggtgtcctggagagtctgagctcctgtctgaccaacaagtactcggagggttatccgggaaagcggtactatggcggcaacgagttcatcgactgcatcgaactcttggcccagaaacgtggccgtgaactcttcaacctgcccgaggacaagtggggcgtcaatgtccagccctactccggttctccggccaatctggctgtctatacgggtgtctgtcgtcctcatgatcgcatcatgggtttggatctgcccgatggtggtcacttgacccatggcttcttcacgcccaccaagaagatctccgccacgtcgatcttcttcgagagcatgccctacaaggtgaatccggagacgggaatcatcgattatgataaactggccgaggcggccaagaccttccgtccgcagatcatcatcgctggcatctcgtgctactccaggctgctggactatgcccgtttccggcagatttgcgacgatgtgggtgcttacctgatggccgatatggcccatgtggcgggaatagtggccgctggactgatcccatcgcccttcgaatatgccgatattgtgacgacgacgacccacaagacgctgcgcggtccccgggccggagtcatcttcttccgcaagggcgtacggagcaccaaggccaacggcgatgtgatcaactatgatctggaggagcgcatcaaccaggccgtcttcccctcgctccagggtggaccgcacaacaacgccgtcgccggcattgccacggccttcaagcaggccaagtcgccggagttcaaggcctaccagacgcaggtcctcaagaacgccaagaccctgtgcgatggtctgatcgccaagggctatcaggtggccaccggtggcactgacgtccatctggtactggttgatgtccgcaaggcgggattaacgggcgccaaggccgagtacatcctggaggaggtgggaattgcctgcaacaagaacaccgtgccgggcgataagtccgccctgaatccttcgggcatccgtctgggcactcctgccctcaccactcgcggtctcatcgagcaggacatcaaccaggtggtgacgttcatcgatgccgctttgaagctgggcgcccaggcggccaaatcggcagccagtcccaagctggccgactaccacaaggtcctggcggaggacaaggacatctctggcaaggtggcggagctccagaaggccgtcaagatcttcagcaggaagttcccattgcccggtctgaagactttctaa

SEQ ID NO: 9978 - protein, 533 aa, Drosophila ananassae
MQKVRCLSLPQKLLYCLSRDVNTKAGNFAGEQLIGALTRVAAAKNPTSTFSPIRRYSYSTENTSRKMSDQKMLQATLEEGDPELADLIKKEKERQLEGLEMIASENFTSVGVLESLSSCLTNKYSEGYPGKRYYGGNEFIDCIELLAQKRGRELFNLPEDKWGVNVQPYSGSPANLAVYTGVCRPHDRIMGLDLPDGGHLTHGFFTPTKKISATSIFFESMPYKVNPETGIIDYDKLAEAAKTFRPQIIIAGISCYSRLLDYARFRQICDDVGAYLMADMAHVAGIVAAGLIPSPFEYADIVTTTTHKTLRGPRAGVIFFRKGVRSTKANGDVINYDLEERINQAVFPSLQGGPHNNAVAGIATAFKQAKSPEFKAYQTQVLKNAKTLCDGLIAKGYQVATGGTDVHLVLVDVRKAGLTGAKAEYILEEVGIACNKNTVPGDKSALNPSGIRLGTPALTTRGLIEQDINQVVTFIDAALKLGAQAAKSAASPKLADYHKVLAEDKDISGKVAELQKAVKIFSRKFPLPGLKTF

SEQ ID NO: 9979 - DNA, 1608 bp, Drosophila erecta
  CDS (1)..(1608)
atgcagctggcgcgcactacactgccccaaaagcttcggctctgccttagccgggacctgaacaccaaagttggcaacccggttaacttcgaaggtggaaagctgcgcgaagctttaactcaccatcgccatcgccatttccagacattctttctaccggcgatcagacgattttcggactccaagcagagcactttgaagaacatggccaatcagaaactactgcaaaccccgctggcggtgggcgatccggagctggccgatctgatccagaaggagaaggagcgccagcgcgagggtctcgagatgatcgccagtgagaacttcacctcggtcgcggtgctcgagagcttgagctcctgcctgaccaacaagtactccgagggatatcccggcaagaggtactacggcggcaacgagtacatcgatcgcatagagctgctggcccagaaacgcggacgcgagctcttcaacctggacgaggcgaagtggggcgtaaatgtgcagccgtactccggatcgccgggcaatctggctgtctacacgggcgtctgccgtccccacgatcgcatcatgggcctggatctgcccgatggcggccacttgacgcacggcttcttcacgcccaccaagaaaatctcggccacatcgatattcttcgagagcatgccgtacaaagtgaacccggagacgggcatcatcgattacgacaagttggcggaggcggccaagaacttccgcccgcaaatcatcattgccggcatctcgtgctactcccggctgctggactacgcccgtttccgtcagatatgcgacgatgtgggcgcctacctgatggccgacatggcccatgtggcgggcattgtggccgccggcctgataccatcaccgttcgagtgggccgacattgtgaccaccaccacgcacaagacgctgcgcggaccgcgcgccggcgtcatcttcttccgcaagggcgtgcgcagcaccaaggcgaatggcgacaaggtactgtacgacctggaggagcgcatcaatcaggcggtgttcccaacacttcagggtggtccgcacaacaatgccatcgctggcattgccacggccttcaggcaggccaagagtcccgaattcaagtcgtaccaggagcaggtgctcaagaatgccaaggtcctgtgcgatggcctcatctcgcgcggctatcaggtggccaccggcggcaccgatgtccatttggtgctggtggatgtgcgcaaggctggcctgaccggcgccaaggcggagtacatactcgaggaggtgggcatcgcgtgcaacaagaacaccgtgcccggcgacaagtccgccatgaatccgtcgggcatccgtctgggcacacctgccctcaccacgcgcggcctcgtcgatcaggacatcgagcaggtggtggccttcatcgatgctgccctcaagttgggcgcccaggccgccaagcagaccagcagccccaagctggccgactaccacaagacgctggcggagaatgtggagctcaagggccaggtggacgcgctgcgcaataatgttgtccagttcagcaggaagttcccgctgcccggcttggagagcctgtag

SEQ ID NO: 9980 - protein, 535 aa, Drosophila erecta
MQLARTTLPQKLRLCLSRDLNTKVGNPVNFEGGKLREALTHHRHRHFQTFFLPAIRRFSDSKQSTLKNMANQKLLQTPLAVGDPELADLIQKEKERQREGLEMIASENFTSVAVLESLSSCLTNKYSEGYPGKRYYGGNEYIDRIELLAQKRGRELFNLDEAKWGVNVQPYSGSPGNLAVYTGVCRPHDRIMGLDLPDGGHLTHGFFTPTKKISATSIFFESMPYKVNPETGIIDYDKLAEAAKNFRPQIIIAGISCYSRLLDYARFRQICDDVGAYLMADMAHVAGIVAAGLIPSPFEWADIVTTTTHKTLRGPRAGVIFFRKGVRSTKANGDKVLYDLEERINQAVFPTLQGGPHNNAIAGIATAFRQAKSPEFKSYQEQVLKNAKVLCDGLISRGYQVATGGTDVHLVLVDVRKAGLTGAKAEYILEEVGIACNKNTVPGDKSAMNPSGIRLGTPALTTRGLVDQDIEQVVAFIDAALKLGAQAAKQTSSPKLADYHKTLAENVELKGQVDALRNNVVQFSRKFPLPGLESL

SEQ ID NO: 9981 - DNA, 1413 bp, Drosophila grimshawi
  CDS (1)..(1413)
atgcagaaaatggaggaccagaaaatgttgcaggccacgctgaaggagagcgatcccgaactcgctgcgatcatcataaaggagaagcagcgtcaactggaaggtctcgagatgattgccagcgagaatttcacctcggtggctgtgctggaaagtttgggctcctgcttgaccaacaaatactcggagggttatcccggcaagcgctactatggcggcaatgagtgcatcgatcagattgagcgaatggctcagtcgcgtggcttggagctctttaacttggatagcagcgagtggggcgtcaatgtgcaaccgtattcgggttctccggcgaatttggctgcgtatacgggcgtgctgcgaccacacgatcgcattatgggcttggatttgcccgatggtggacatttgacgcatggcttctttacgcccagcaagaaaatctcagccacatcgatattctttgagagtatgccgtataaggttaatgcggtgacgggcctcattgactatgataagctcgcggaggctgctcgcacattccgtccccagatcatcattgcgggcatctcgtgctattcacgtctgctggactatggacgcttccgcaagatctgtgacgaggtcggcgcctatctaatggccgatatggcacacgttgccggtctcgttgccgccgagcagataccctcgccattccaatacgccgacattgtgacgacgacaacgcacaaaacgttgcgtggaccacgtgccggtgtcatcttcttccgcaagggtgtgcgcagcaccaaggccaacggtgacaagatcctatacgatctggaggatcgcatcaatcaggccgtattcccaggtctacagggtggtccgcataatcatcaaattgctggcattgccacagcattcaagcaggcgaaatccgtgccgtttaggaactatcaggcacagatcatcaagaatgcgcagacactgtgcaagggtctgatcaatttgggctatgaggtggccaccggcggcaccgatgtccatctcgttctggtcgatttacgcaataagggtttgagtggcgcccgggccgaactggtcctcgaggaggtgggcattgcttgcaacaagaatacggtgccgggtgataagtccgcactgaatccgtccggcctgcgcttgggcacaccggcgttgaccacacgtggcctgctcgagaaggatatgcagcaggtggtcgccttcattcatgcagcgctcaacattggcgttgaggcggctaaagtcactggtggtcccaaattgaccgacttcgccaggaccctggccgagaacagcgagatcaagcagaaactggaggatcttcacaagtccatcgtcaaattcagcaccagcttcccactgcccggccttggttccctgtaa

SEQ ID NO: 9982 - protein, 470 aa, Drosophila grimshawi
MQKMEDQKMLQATLKESDPELAAIIIKEKQRQLEGLEMIASENFTSVAVLESLGSCLTNKYSEGYPGKRYYGGNECIDQIERMAQSRGLELFNLDSSEWGVNVQPYSGSPANLAAYTGVLRPHDRIMGLDLPDGGHLTHGFFTPSKKISATSIFFESMPYKVNAVTGLIDYDKLAEAARTFRPQIIIAGISCYSRLLDYGRFRKICDEVGAYLMADMAHVAGLVAAEQIPSPFQYADIVTTTTHKTLRGPRAGVIFFRKGVRSTKANGDKILYDLEDRINQAVFPGLQGGPHNHQIAGIATAFKQAKSVPFRNYQAQIIKNAQTLCKGLINLGYEVATGGTDVHLVLVDLRNKGLSGARAELVLEEVGIACNKNTVPGDKSALNPSGLRLGTPALTTRGLLEKDMQQVVAFIHAALNIGVEAAKVTGGPKLTDFARTLAENSEIKQKLEDLHKSIVKFSTSFPLPGLGSL

SEQ ID NO: 9983 - DNA, 1404 bp, Drosophila mojavensis
  CDS (1)..(1404)
atggcggaccaaaagatgttgcaggcaacgctgaaggagagcgacccggagctggccgatatcatagtcaaggagaaggagcgccaacgggagggcctcgagatgattgccagcgagaatttcacctcgttggctgtgttggagagcttgagctcctgtctgaccaacaaatactctgagggctatccgggcaagcgctattatggtggcaatcagttcattgatcagattgagaacctggcgcgggctcgcggcctcgaattgttcaatctcaacagcaacgattggggcgtcaatgtgcagccctattccggatcgccggccaatctggctgtctatacgggcgtactgcgtccacatgatcgtattatgggcctggatctgcccgatggcggccatttgacgcacggcttcttcacgcccagcaagaagatctcggccacatccatcttcttcgagagcatgccgtacaaggtgaatccggagacgggcctgattgactacgacaagctggctgaggcagcgcgcacattccgccctcagatcatcatcgctggcatctcgtgctattcacgtctgctcgattacggccgtttccgtaagatctgtgacgaggtcggcgcctatctgatggccgacatggcgcacgtcgccggcttggtggccgccgagcagatcccctctccattcgagtacgccgacatcgtgaccacaacgacgcacaagacgctgcgcggtccacgtgccggcgtcatcttcttccgcaagggcgtgcgcagcaccaaggccaacggcgagaaggtcctctacgatctggaggagcgcatcaatcaggccgtattcccggccctgcagggtggaccgcacaacaatgccattgctggcattgccacggccttcaagcaggccaagtcggccgagttcaaggaataccaggcgcaggtgataaagaacgcgaagacactgtgcaagggtctcgtcgatctgggctatacggtggccaccggcggcaccgatgtccatctcgtgctggtggacgtgcgcaaaaccggactgaccggcgccaaggccgagctggtgctcgaggaggtgggcattgcgtgcaacaagaatacggtgcccggcgacaagtccgccatgaatccgtccggcatacgcctgggcacgccggccctaaccactcgcggcctcctcgagaaggacatcgagcaggtggtcgtcttcatcgatgccgcgctgaagatcggctccgaggccgtcaaggcagcgggcagccccaaaatggtcgacttcaccaagaccctggccgagaacgctagcatcaagcagcagctggaggagctccacaaatgcgtcatcaaattcagcaccaccttccccctgcccggccacgatctgctctaa

SEQ ID NO: 9984 - protein, 467 aa, Drosophila mojavensis
MADQKMLQATLKESDPELADIIVKEKERQREGLEMIASENFTSLAVLESLSSCLTNKYSEGYPGKRYYGGNQFIDQIENLARARGLELFNLNSNDWGVNVQPYSGSPANLAVYTGVLRPHDRIMGLDLPDGGHLTHGFFTPSKKISATSIFFESMPYKVNPETGLIDYDKLAEAARTFRPQIIIAGISCYSRLLDYGRFRKICDEVGAYLMADMAHVAGLVAAEQIPSPFEYADIVTTTTHKTLRGPRAGVIFFRKGVRSTKANGEKVLYDLEERINQAVFPALQGGPHNNAIAGIATAFKQAKSAEFKEYQAQVIKNAKTLCKGLVDLGYTVATGGTDVHLVLVDVRKTGLTGAKAELVLEEVGIACNKNTVPGDKSAMNPSGIRLGTPALTTRGLLEKDIEQVVVFIDAALKIGSEAVKAAGSPKMVDFTKTLAENASIKQQLEELHKCVIKFSTTFPLPGHDLL

SEQ ID NO: 9985 - DNA, 1620 bp, Drosophila persimilis
  CDS (1)..(1620)
atgcagcgcataagccatcacctaacacaaaagctcgtgccaggccttagcagagacttgaacaccaaaacggttaacttttctcttcgccagcggcagcagccggtccgagcttttacacagaaattattgccggcagcgctgctaacgccatcatttccattcgcgatcagacgatattcggaaggcaaaaaaaccacaactttgggctcgaaaatggaggatcaaaaactgctgcaggccacgctggaggatagcgatccggagctggcgaatctcatcaagcaggagaaggagcgacagcgcgagggactcgaaatgattgccagcgagaatttcacttcggtggccgttctggagagtcttggctcctgcctgaccaacaagtactcggagggatatcccggcaagcggtactatggcggcaacgagttcattgaccgcatcgagctgctggcccagaagcgcggccgtgagctattcaatctgaacgaggaggtgtggggcgtgaatgtccagccatactcgggctctccggccaatatggccgcctatgtgggcgtctgtcgtccgcacgaccgcatcatgggcctggatctgcccgatggcggtcatctgacgcacggcttcttcacggccaccaaacggatctcggccacctcgatcttcttcgagagcatgccgtacaaggtgaaccccgtgacgggcattattgactacgacaagctggccgaggcggccaaggccttcaagccgcagatcatcatcgccggcatctcgtgctactctcgcctgctcgactacggacgcttccgtcagatctgcgacgatgtgggcgcctacctaatggccgatatggctcatgtggcaggtctggttgctgccggtcacataccatcgcccttccagtacgccgacattgtgaccacaaccacgcacaaaaccttgcgcggaccacgcgccggcgtcatctttttccgcaagggcttgcgcagcgtaaagaccaacggggacaaggtgctgtacgatctggaggatcgcatcaatcaggccgtcttcccatcgctgcagggcggaccacacaacaatgccatagccggcattgccaccgccttcaagcaggccaagtccgcggaattcaagagctaccagtcccatgtgatcaagaacgccaaggtgctttgcgaggccctgattgccaagggctatcaggtggccaccggcggcactgatgtccatctcgtgctggtggatgtccgaaacgtcggccttaccggtgccagggcggagctaattctcgaggaggtaggaattgcctgcaacaagaacaccgttcccggggacatgtccgccatgaatccgtccggtatccgtttgggcacaccggcgttgaccacgcgcggccttgtcgagaaggacatcgatcaggtggtgaacttcatagatgcggccctcaagatcggcgccgaggccgcccaggctgcgggcagcaacaagatggtcgactttcagaaggtcctcgctgaagatgcaacgatcaaggccaagatcgagcagatccacaagtgcgtgatcgcgttcagcaagcagttccctctgcccggcctcaagactttttaa

SEQ ID NO: 9986 - protein, 539 aa, Drosophila persimilis
MQRISHHLTQKLVPGLSRDLNTKTVNFSLRQRQQPVRAFTQKLLPAALLTPSFPFAIRRYSEGKKTTTLGSKMEDQKLLQATLEDSDPELANLIKQEKERQREGLEMIASENFTSVAVLESLGSCLTNKYSEGYPGKRYYGGNEFIDRIELLAQKRGRELFNLNEEVWGVNVQPYSGSPANMAAYVGVCRPHDRIMGLDLPDGGHLTHGFFTATKRISATSIFFESMPYKVNPVTGIIDYDKLAEAAKAFKPQIIIAGISCYSRLLDYGRFRQICDDVGAYLMADMAHVAGLVAAGHIPSPFQYADIVTTTTHKTLRGPRAGVIFFRKGLRSVKTNGDKVLYDLEDRINQAVFPSLQGGPHNNAIAGIATAFKQAKSAEFKSYQSHVIKNAKVLCEALIAKGYQVATGGTDVHLVLVDVRNVGLTGARAELILEEVGIACNKNTVPGDMSAMNPSGIRLGTPALTTRGLVEKDIDQVVNFIDAALKIGAEAAQAAGSNKMVDFQKVLAEDATIKAKIEQIHKCVIAFSKQFPLPGLKTF

SEQ ID NO: 9987 - DNA, 1614 bp, Drosophila virilis
  CDS (1)..(1614)
atgctacatttacgatcatcggccgcccgtctccccgcaaaggcaatgccagttatgacagcggccgtcagaacatttaacagcagcaatcagcatgatcaacggcctgccaacttgatcgtaactcgactggcatcgaaaatcacgccgcaaatttcgtcggctgcgatcagaaactattcaaactcggttgcggtaagtgtgcttaagatggcagatcagaaaatgttgcaggccacgctgaagcagagcgatccggagctggccgatatcattataaaggagaaggagcgtcagcgcgagggactcgagatgattgccagcgagaacttcacctcgctggccgtcctggagagtctgggctcctgtctgaccaacaaatattcagagggctatccaggcaagcgctactatggtggcaatcaatttattgatcagattgaatgcctggctcagacacgcggccttcatctgttcaatctggatgccagcgaatggggcgtcaatgttcagccctattccggctcgccggccaatctggccgcgtacacgggcgtgctgcgtccacacgatcgtattatgggcctggatctgcccgatggtggacatttgacgcacggcttctttacgccaaacaagaaaatctcggctacatccatcttctttgagagcatgccctataaggtgaatcccgaaacgggcatcatcgactatgaaaaactggcagaggcggccagaaatttccgtccgcagattatcattgcgggcatctcgtgctattcgcgcctgctggactatgcacgcttccgcaagatctgtgacgaggtcggcgcatatctgatggccgacatggcgcacgtggctggactcgtggccgccgagcagataccctcaccatttgagtacgccgacattgtgacgaccacgacgcacaagacgctgcgcggtccgcgagccggcgtcatcttcttccgcaagggtgtgcgcagcacaaaaccaaacggcgagaaggttatgtacgatctagaggagcgcatcaatcaggcggtgttcccggcgctgcagggtgggccgcataataatgccattgccggcattgccacggcctttaagcaggccaaatcgccggaattcaagggctaccagacgcaggtcatcaagaatgccaaggcgctgtgcaagggcctcatcgatctgggctatacggtggccaccggcggcaccgatgttcatctcgtgctggtcgatgtgcgcaaaaccggcctaaccggcgccaaggctgagctggtgctcgaggaggtgggcatagcctgcaacaagaacacggtgcccggcgataagtccgccctgaatccgtccggcatacgcctgggcacgccagcgctaaccacgcgcggtctactcgaaaaggacatggaacaggtggtcgccttcatcgatgcggcgctcaaaattggcgccgacgctgtcaaagcggcgggcggccccaaattggttgactatacgaagaccctaaacgagaatccggccatcaagcagcagctgtcggagcttcacgaatgcgttaagaagttcagcgtcacgttcccgctgcccggacaagagtgtctctag

SEQ ID NO: 9988 - protein, 537 aa, Drosophila virilis
MLHLRSSAARLPAKAMPVMTAAVRTFNSSNQHDQRPANLIVTRLASKITPQISSAAIRNYSNSVAVSVLKMADQKMLQATLKQSDPELADIIIKEKERQREGLEMIASENFTSLAVLESLGSCLTNKYSEGYPGKRYYGGNQFIDQIECLAQTRGLHLFNLDASEWGVNVQPYSGSPANLAAYTGVLRPHDRIMGLDLPDGGHLTHGFFTPNKKISATSIFFESMPYKVNPETGIIDYEKLAEAARNFRPQIIIAGISCYSRLLDYARFRKICDEVGAYLMADMAHVAGLVAAEQIPSPFEYADIVTTTTHKTLRGPRAGVIFFRKGVRSTKPNGEKVMYDLEERINQAVFPALQGGPHNNAIAGIATAFKQAKSPEFKGYQTQVIKNAKALCKGLIDLGYTVATGGTDVHLVLVDVRKTGLTGAKAELVLEEVGIACNKNTVPGDKSALNPSGIRLGTPALTTRGLLEKDMEQVVAFIDAALKIGADAVKAAGGPKLVDYTKTLNENPAIKQQLSELHECVKKFSVTFPLPGQECL

SEQ ID NO: 9989 - DNA, 1404 bp, Drosophila willistoni
  CDS (1)..(1404)
atgacggatcaacaattattacaaactaacctggagacaagtgatcccgaattggcggcgatcattaagaaggagaaggaacgccaacgtgaaggtctcgagatgattgccagtgagaactatacctcagtggctgtattggattgtttgagctcttgtctgaccaacaagtattccgagggctatcctggcaaaaggtattatggtggcaatgagtacatcgatatggtggaattgctggcccaagctcgtggacgtgagctgttcaatttggatgcagataaatggggcgttaatgtacaaccatattccggttcaccggccaatttggctgtctacacaggcgtctgtcgtccccatgatcgtattatgggtctcgatttgcccgatggcggtcatttgacacacggctttttcacgcccaccaaaaagatatcggccacgtcgatattctttgagagcatgccatacaaagtgaatcccacaaccggaatcattgactatgacaaattggccgaagcagccaaaacattccgtccccaggttataattgctggcatttcgtgctattcgcgtctgctcgattataagcgtttccgtgagatttgcgatgatgttggtgcctatctgatggccgatatggctcatgtggctggtttggtggcagctggtctgatcccctcaccgtttgagtatgccgacattgtgagcaccacaacccacaagactttgcgtggcccccgcgccggtgtcatcttcttccgcaagggagtgcgcagcaccaaaccgaatggcgacaaagtgctctacgatctggaggagcgcatcaatcaggctgtattccctgccctgcaaggtggaccgcataataacgccatcgctggcattgctacggccttcaagcaggccaaatcgcccgagttcaaggaatatcagacccgtgtcatcaagaatgccaaggtcctgtgcaagggtcttatcgagaagggttatgtagtggccaccggtggcactgatgtccatctcgtgttggtggatgttcgcaccgcgggtctaaccggtgccaaggctgaatatattctggaattggtgggcattgcctgcaataagaacaccgtaccgggcgataagtccgccctgaatccatcgggcattcgtctgggtacacctgctctgaccacacgtggtcttaatgaaaaggacatcgaacaggttgtctccttcattgatgaggccctcaaagctggtgcggaggcagccaaagcagccgctggccccaaattggccgattatcacaaggttttcaatgacaacgagaagatcaagaacaaagtcaatgatattcatcaacgtatcattgcctttacaaagactttcccactgcccggattggatgttctgtaa

SEQ ID NO: 9990 - protein, 467 aa, Drosophila willistoni
MTDQQLLQTNLETSDPELAAIIKKEKERQREGLEMIASENYTSVAVLDCLSSCLTNKYSEGYPGKRYYGGNEYIDMVELLAQARGRELFNLDADKWGVNVQPYSGSPANLAVYTGVCRPHDRIMGLDLPDGGHLTHGFFTPTKKISATSIFFESMPYKVNPTTGIIDYDKLAEAAKTFRPQVIIAGISCYSRLLDYKRFREICDDVGAYLMADMAHVAGLVAAGLIPSPFEYADIVSTTTHKTLRGPRAGVIFFRKGVRSTKPNGDKVLYDLEERINQAVFPALQGGPHNNAIAGIATAFKQAKSPEFKEYQTRVIKNAKVLCKGLIEKGYVVATGGTDVHLVLVDVRTAGLTGAKAEYILELVGIACNKNTVPGDKSALNPSGIRLGTPALTTRGLNEKDIEQVVSFIDEALKAGAEAAKAAAGPKLADYHKVFNDNEKIKNKVNDIHQRIIAFTKTFPLPGLDVL

SEQ ID NO: 9991 - DNA, 1647 bp, Drosophila yakuba
  CDS (1)..(1647)
atgcagctggcgcgctctacactgccacaaaagcttcgcttttgccttagccgggacctgaacacccaagttcaagttggcaacccggttaacgggtttcgcgcagcgagaactgcgagcggagctttaactcgcgtcgcttccaaaaattaccaacaccaacaacatcaacatcatccattggcgttctttgggccggcgatcagacgatattcggacgccaagcagagcactttgaagaacatggccgatcagaagatgctgcaaaccccgctggcggcgggcgatccggagctggccgagctgatcaagaaggagaaggagcgacagcgcgagggtctcgagatgatcgccagtgagaacttcacctcggtggcggtcctcgagagcctgagctcctgcctgaccaacaagtactccgagggctatcccggcaagaggtactacggtggcaatgagtacatcgatcgcatcgagctgctggcccagcaacgtggacgcgagctgttcaacctggcggaggagaagtggggcgtgaatgtgcagccgtactccggttcgccggccaatctggctgtgtacacaggcgtctgccggcctcacgatcgcatcatgggtctggatctgcccgatggcggtcacttgacgcacggcttctttacgcccaccaagaagatatcggccacatccatattcttcgagagcatgccgtacaaagtgaatccggagacgggcatcattgactacgacaagttggcggaggcggcaaagactttccggccgcagatcatcattgcgggcatttcgtgctactcccgactgctggactacgcacgattccgtcagatatgcgatgatgtgggcgcctacctgatggccgacatggcccatgtggcgggcattgtggccgccggcttgataccatcgccattcgaatgggcggacattgtgaccaccaccacgcacaagacgctgcgcggtccacgcgccggcgtcatcttcttccgcaagggtgtgcgcagcaccaaggccaatggcgacaaggtcctgtacgatctggaggagcgcatcaaccaggcggtcttcccctcactccaaggtggtccgcacaacaatgccgtcgccggcattgccaccgccttcaggcaggccaagagtcccgaattcaaggcataccagacgcaggtgctcaagaacgccaaggtcctgtgcgatggcctcatctcgcgcggctatcaggtggccaccggcggcaccgatgtccatttggtgctggtcgatgtgcgcaaggctggcctcaccggcgccaaggccgagtacatactcgaggaggtgggcatcgcgtgcaacaagaacaccgtgcccggcgacaagtccgccatgaatccctcgggcatccgtctgggcacacccgccctgaccactcgcggccttgccgagcaggacatcgaacaggtggtggccttcatcgatgccgcactcaaggtgggcgcccaggcagccaagctgaccagcagtcccaagctggccgactaccacaagacgctggccgagaatgtggagctgaagggccaggtggacacgatccgcaacaacgtcgcccagttcagcaggaagttcccgctgcccggcttggagaccctatag

SEQ ID NO: 9992 - protein, 548 aa, Drosophila yakuba
MQLARSTLPQKLRFCLSRDLNTQVQVGNPVNGFRAARTASGALTRVASKNYQHQQHQHHPLAFFGPAIRRYSDAKQSTLKNMADQKMLQTPLAAGDPELAELIKKEKERQREGLEMIASENFTSVAVLESLSSCLTNKYSEGYPGKRYYGGNEYIDRIELLAQQRGRELFNLAEEKWGVNVQPYSGSPANLAVYTGVCRPHDRIMGLDLPDGGHLTHGFFTPTKKISATSIFFESMPYKVNPETGIIDYDKLAEAAKTFRPQIIIAGISCYSRLLDYARFRQICDDVGAYLMADMAHVAGIVAAGLIPSPFEWADIVTTTTHKTLRGPRAGVIFFRKGVRSTKANGDKVLYDLEERINQAVFPSLQGGPHNNAVAGIATAFRQAKSPEFKAYQTQVLKNAKVLCDGLISRGYQVATGGTDVHLVLVDVRKAGLTGAKAEYILEEVGIACNKNTVPGDKSAMNPSGIRLGTPALTTRGLAEQDIEQVVAFIDAALKVGAQAAKLTSSPKLADYHKTLAENVELKGQVDTIRNNVAQFSRKFPLPGLETL

SEQ ID NO: 9993 - DNA, 1413 bp, Trichoplax adhaerens
  CDS (1)..(1413)
atggctgataattatcaattcgatagcagtttaaagaattctcttcaagaggaagatcctgaaatctatcacttaatctgcaaagagaaaaaacgccaaaggcttggtttagaattgattgcgtcagaaaattacgctagtcgagcgacattacaagcattgggatcgtgtctcaataataaatattctgaaggctatcctggggctcgttattatagtggcacacaagtcgtcgatgacattgagttgttatgccaacgtcgagctcttgaattatttggattagatcgtgaacagtggggcgttaatgtacaaccttattctggctcaccggctaattttgctgtttataccgcattattacaacctcatgatcgaatcatgggcttagatttacccgatggtggccatttaacccatggctacatgaacgatactaagcgtatttcagcttcgtccatttatttcgagtccatgccatacaagatcaatcctaccacaggtttaatcgattacgatcaattggaagccaatgcaaaattatttaggcctaaattaattattgctgggattagtagttattgtcgccatctcgattatgcccgtatacgacaaattgctgaccaacaaaaggcatacgttctatcggatatggcccatgtcagtggccttgttgccgccaaacttgcccctactcctttccaatattctgatgtggttacaaccaccacacataagacactacgtggaccccgttctgcattgattttctaccgtaaaggaatacgccatcatgatcaatctggccagccgatctattacgatttgcaagataaaatcaattttgctgtctttccagcattacaaggtgggccacataatcatgccattgccgctgtcgctgtcgctttaaaagaagctcaatcggataaatttatacaatatcaaaaacaagtgttaagtaattgtcaaacattatccgatggtttaatcgcacttggctatacattagtcaccggtggtagtgacaatcatttaattttactcgatttaagaccacaaaaattaaatggtgcccgtgctgttgaagtatttgaaagagtccacattagtgctaacaagaacacctgccctggcgataaaaatgccttaatacccagtggtattcgttttggaactccagctttaaccagtcgtggattgagttgtcaggatatggtgaaaatagtacaatttatccatcgtgctttgcaaattgcaattgatgccactagtactgttgcggggaaatccattaaagactataaagctacccttgatcaggaagagtatcaagcaaagatacaacaactagcagaagaagtactcgagttttctagccaattcccaacacctggttctgatgtcatataa

SEQ ID NO: 9994 - protein, 470 aa, Trichoplax adhaerens
MADNYQFDSSLKNSLQEEDPEIYHLICKEKKRQRLGLELIASENYASRATLQALGSCLNNKYSEGYPGARYYSGTQVVDDIELLCQRRALELFGLDREQWGVNVQPYSGSPANFAVYTALLQPHDRIMGLDLPDGGHLTHGYMNDTKRISASSIYFESMPYKINPTTGLIDYDQLEANAKLFRPKLIIAGISSYCRHLDYARIRQIADQQKAYVLSDMAHVSGLVAAKLAPTPFQYSDVVTTTTHKTLRGPRSALIFYRKGIRHHDQSGQPIYYDLQDKINFAVFPALQGGPHNHAIAAVAVALKEAQSDKFIQYQKQVLSNCQTLSDGLIALGYTLVTGGSDNHLILLDLRPQKLNGARAVEVFERVHISANKNTCPGDKNALIPSGIRFGTPALTSRGLSCQDMVKIVQFIHRALQIAIDATSTVAGKSIKDYKATLDQEEYQAKIQQLAEEVLEFSSQFPTPGSDVI

SEQ ID NO: 9995 - DNA, 1470 bp, Ciona intestinalis
  CDS (1)..(1470)
atgttaagtagattgtatccacgcctcattcaacaagtatatgctgtgaacgcttcaccactatctagattcagttccaaatggaccggaagagaatctttagaatctgaagatccagaaatattaagaatcatcaagaatgaaaaagatcgtcaactaagagggttggaacttatagcgtcggagaatttctgctcacgagctgccattgaagcaatgtcgtcttgtttaacgaacaaatattcagaaggatacccaggccagcgttattatggtggtactgaaaatgttgatgaacttgagctgttgtgccagaagcgtgctttggaagctttccatcttaaccctgatgaatggggcgttaatgttcaaccttattctggttctcctgccaactttgcagcttacacagcagtattgaaaccgcatgatagaataatggggttggatcttcctgatggtggacatttaacacatggttttatgacggacgctaagagaatttcttccacaagtatttattttgaatcgatgccgtatcgacttaatccctctactggctacattgacatggatgcattagagaacagtgccaagctattccgtccgagaatgatcatcgctggtgcgagcgcttattcacgcctcatcgattataagaggatgagagagatagcagaccaacatggcgcatatgtgttgtcagacatggcacatataagtggattagttgccacacaacttgtaccttctccattcgaacacagtgatatcgttacaactaccacacataagacattgagggggccaagggctggaatcattttcttcaggaaaggtgtacgaagtgttcacaagaaaacgggcaaagaaacgatgtatgatttggagagtcgtatcaactttgcagtgtttccaagtttacaaggaggaccacacaacccagcaattgcagctattgcagtagcattaaaacagtcaatggaaccatttttcaaggaataccaaattcaaactttaaaaaacgcggcaaccatggccagtgagttgacagcaaggggttacaacctcgtttcaggtgggacagataatcacctcgtgctcgttgatctgcgacccaagggaatcgatggagcgcgaacggagaaagttctcgagcttgcttcggttaccgtgaacaagaacagcgttccgggggataaaagcgctctcatgccaggagggttgagattgggtgcccccgcattaacctcccgtgactttgttgaagaagattttgtgaaagttgttgattttcttgataaaggggttgagatcgctattgaagcaaagaagaaaaccaaaaaactcgcggacttcaaatcatttatcgaaacaaatcctgaaacagttgaaaaaatctcaaatcttcgaaacgaggtcgaaaaattcgctcgtagtttcccaatgccagggttcgaggaccattaa

SEQ ID NO: 9996 - protein, 489 aa, Ciona intestinalis
MLSRLYPRLIQQVYAVNASPLSRFSSKWTGRESLESEDPEILRIIKNEKDRQLRGLELIASENFCSRAAIEAMSSCLTNKYSEGYPGQRYYGGTENVDELELLCQKRALEAFHLNPDEWGVNVQPYSGSPANFAAYTAVLKPHDRIMGLDLPDGGHLTHGFMTDAKRISSTSIYFESMPYRLNPSTGYIDMDALENSAKLFRPRMIIAGASAYSRLIDYKRMREIADQHGAYVLSDMAHISGLVATQLVPSPFEHSDIVTTTTHKTLRGPRAGIIFFRKGVRSVHKKTGKETMYDLESRINFAVFPSLQGGPHNPAIAAIAVALKQSMEPFFKEYQIQTLKNAATMASELTARGYNLVSGGTDNHLVLVDLRPKGIDGARTEKVLELASVTVNKNSVPGDKSALMPGGLRLGAPALTSRDFVEEDFVKVVDFLDKGVEIAIEAKKKTKKLADFKSFIETNPETVEKISNLRNEVEKFARSFPMPGFEDH

SEQ ID NO: 9997 - DNA, 1440 bp, Ciona intestinalis
  CDS (1)..(1440)
atgtcttgtggagatacaaaaccgaccgaaactaaggagtctgcatggttggagcaaccgcttgaagaaaatgatcctgaaatctacagaattatcagaaatgagaaagaacggcagagagatggacttgaattaatagcgtcggagaattttaccagtggggcagttttggaagctttagggtcctgcttgaataataaatactcggaaggatatccaggcgtaagatattatggaggaacagaaaacattgatgaactggagcgactttgccagaaaagagctttggaagttttcaaactcaaccctgaagaatggggtgttaatgtacagccctactcaggctcaccagcaaactttgctgttttaacagccattgttgagccccacggtcgtataatggggttggacctccccgatggcggccatcttactcatggcttcatgaccgagaagaagaaaatatcagcgacctccattttctttgagtcgatgccatataaggtgaatcctgcaacaggacttatagattacgatcaactggaacaaaatgcaaaacttttcaaaccgaaagtgattattgctggcatgagttgttactcgcgtgtcattgattatgagcgaatacgcaagatagctgatgccaacaaagcacttgtgatggctgacatggctcatgttagcggtttagtagcaactggtgtaatcccttcaccatttgaacattgccagatagttaccagcacgacacacaagacgctaaggggtccacgcgctggtataatcttctacaggcgtggtgtcaaagtacccgccaccgatggcaaacctgcggagatgtacaactttgaaaagccgataaatgaagctgttttccccggcttacagggtggcccccataaccatgcgattgctggtgtggccgtgtgtctgttgcaagcaaaatcccccatgtttatcgaatatcagaagaacgtggtaagcaatgcacaaacattggggaaagtcctcatggacaaaggatatgatgtggtgactggtggaacagatacgcatcttatactggttaaccttaaaagcaagggtacagatggtaacagggcagacaaagtgttagaagccattggtgttgcttgcaataagaacacttgcccaggtgataaagcagcattgcgtccaagtgggttgagacttggttcaccagctctcacttcaagggggttgaatgggaaagattttgagaaggttgcggatttcattgacaggggggtgcaactgactgtggagattcaaaacagtcttgaacccaaagctacattcaaggatttcagagtgaagttatataacgatgatgtcataataggaaaggttaaagcattgaaggaagaagttacaatgttcgcacgtacatttccaatacctggccttaaatatacttaa

SEQ ID NO: 9998 - protein, 479 aa, Ciona intestinalis
MSCGDTKPTETKESAWLEQPLEENDPEIYRIIRNEKERQRDGLELIASENFTSGAVLEALGSCLNNKYSEGYPGVRYYGGTENIDELERLCQKRALEVFKLNPEEWGVNVQPYSGSPANFAVLTAIVEPHGRIMGLDLPDGGHLTHGFMTEKKKISATSIFFESMPYKVNPATGLIDYDQLEQNAKLFKPKVIIAGMSCYSRVIDYERIRKIADANKALVMADMAHVSGLVATGVIPSPFEHCQIVTSTTHKTLRGPRAGIIFYRRGVKVPATDGKPAEMYNFEKPINEAVFPGLQGGPHNHAIAGVAVCLLQAKSPMFIEYQKNVVSNAQTLGKVLMDKGYDVVTGGTDTHLILVNLKSKGTDGNRADKVLEAIGVACNKNTCPGDKAALRPSGLRLGSPALTSRGLNGKDFEKVADFIDRGVQLTVEIQNSLEPKATFKDFRVKLYNDDVIIGKVKALKEEVTMFARTFPIPGLKYT

SEQ ID NO: 9999 - DNA, 1323 bp, Ciona intestinalis
  CDS (1)..(1323)
atgtcttgtggagatacaaaaccgaccgaaactaaggagtctgcatggttggagcaaccgcttgaagaaaatgatcctgaaatctacagaattatcagaaatgagaaagaacggcagagagatggacttgaattaatagcgtcggagaattttaccagtggggcagttttggaagctttagggtcctgcttgaataataaatactcggaaggatatccaggcgtaagatattatggaggaacagaaaacattgatgaactggagcgactttgccagaaaagagctttggaagttttcaaactcaaccctgaagaatggggtgttaatgtacagccctactcaggctcaccagcaaactttgctgttttaacagccattgttgagccccacggtcgtataatggggttggacctccccgatggcggccatcttactcatggcttcatgaccgagaagaagaaaatatcagcgacctccattttctttgagtcgatgccatataaggtgaatcctgcaacaggacttatagattacgatcaactggaacaaaatgcaaaacttttcaaaccgaaagtgattattgctggcatgagttgttactcgcgtgtcattgattatgagcgaatacgcaagatagctgatgccaacaaagcacttgtgatggctgacatggctcatgttagcggtttagtagcaactggtgtaatcccttcaccatttgaacattgccagatagttaccagcacgacacacaagacgctaaggggtccacgcgctggtataatcttctacaggcgtggtgtggccgtgtgtctgttgcaagcaaaatcccccatgtttatcgaatatcagaagaacgtggtaagcaatgcacaaacattggggaaagtcctcatggacaaaggatatgatgtggtgactggtggaacagatacgcatcttatactggttaaccttaaaagcaagggtacagatggtaacagggcagacaaagtgttagaagccattggtgttgcttgcaataagaacacttgcccaggtgataaagcagcattgcgtccaagtgggttgagacttggttcaccagctctcacttcaagggggttgaatgggaaagattttgagaaggttgcggatttcattgacaggggggtgcaactgactgtggagattcaaaacagtcttgaacccaaagctacattcaaggatttcagagtgaagttatataacgatgatgtcataataggaaaggttaaagcattgaaggaagaagttacaatgttcgcacgtacatttccaatacctggccttaaatatacttaa

SEQ ID NO: 10000 - protein, 440 aa, Ciona intestinalis
MSCGDTKPTETKESAWLEQPLEENDPEIYRIIRNEKERQRDGLELIASENFTSGAVLEALGSCLNNKYSEGYPGVRYYGGTENIDELERLCQKRALEVFKLNPEEWGVNVQPYSGSPANFAVLTAIVEPHGRIMGLDLPDGGHLTHGFMTEKKKISATSIFFESMPYKVNPATGLIDYDQLEQNAKLFKPKVIIAGMSCYSRVIDYERIRKIADANKALVMADMAHVSGLVATGVIPSPFEHCQIVTSTTHKTLRGPRAGIIFYRRGVAVCLLQAKSPMFIEYQKNVVSNAQTLGKVLMDKGYDVVTGGTDTHLILVNLKSKGTDGNRADKVLEAIGVACNKNTCPGDKAALRPSGLRLGSPALTSRGLNGKDFEKVADFIDRGVQLTVEIQNSLEPKATFKDFRVKLYNDDVIIGKVKALKEEVTMFARTFPIPGLKYT

SEQ ID NO: 10001 - DNA, 1479 bp, Hydra magnipapillata
  CDS (1)..(1479)
atggctattcatttttctataaaaagatgtgttatgcaaccttgtaaaattctgtctatggttcatttttctacatcaaatattttaaatgcatggacaggaaaagaatcattggatgttgatgatcctgaaatgtttaagttgattcaaaaagaaaaaaagagacaaacagaaggtttagaattaattgcttctgagaatttttgcagtaaagcagctttgcaagcattaggaagttgtttaaacaataaatattcagaaggctatccaggtgctagatattatggtgggaatgatgttattgatgatatcgaaagacttgtacaacaaagagcattgaaagcttttcatcttgattctgaaaaatggggtgtaaacgtacaagtttactcgggggcaccagcaaattttgctatttacaccggtcttttaaatcctcatgatcgaataatgggacttgatttaccacatggaggccatttgtctcatggtttttccacagatacaaagagagtttcagcaacatcaaaatttttcgagtcaatgccgtacaggctcaatgaacgcactggactaattgactatgataaattggaggaaactgcacatctctttagaccaaaaattttaattgctggaacaagtgcttattcaagattaattgactatgagcggatgaaaaagatcagttcaagcattaatgcttatcttcttgctgatatggcacacataagtggtttggttgctgccagagtcattcccagtccttttgattatgctgatgtggtatctacaacaactcataaaacattaagggctgtaagacactctttgatattttatcgcaaaggggtaagaagtataaacagtaaaggagaagaaatcatgtatgatttagaaagaccaatcaatgatgctgtctttccaggtctacaaggtggaccgcataatcattcaatggctggtgttggggttggactacatcaggccatgacaccagagtttcgtgattaccaagttcaagtactaaagaatgccaaaaccatggcagaacaacttatggcaaaaggttatgacattgtatccaatggaactgacaaccatcttgtattagttgatttgagaccaaagggcattgacggttcacgcgttgagtttgtattagatcaagcatctattacagccaataaaaatacagttccaggagataaaagcgccatgaagcctagtggtttaagattaggtgctgctgcacttacgtcaaggaattttaaagaaaacgattttgtaaaagtcatcgatttattaaacaagggggttgaaatcggattggaagctcaaaaattaactaaaacattaaaagaatataaatcaatatttaaaaccaaccggacgattatggacggagtagattcgttacgtcaagaggtgtgccagtttgcatgtacttttccaatgccgggattagatgatttataa

SEQ ID NO: 10002 - protein, 492 aa, Hydra magnipapillata
MAIHFSIKRCVMQPCKILSMVHFSTSNILNAWTGKESLDVDDPEMFKLIQKEKKRQTEGLELIASENFCSKAALQALGSCLNNKYSEGYPGARYYGGNDVIDDIERLVQQRALKAFHLDSEKWGVNVQVYSGAPANFAIYTGLLNPHDRIMGLDLPHGGHLSHGFSTDTKRVSATSKFFESMPYRLNERTGLIDYDKLEETAHLFRPKILIAGTSAYSRLIDYERMKKISSSINAYLLADMAHISGLVAARVIPSPFDYADVVSTTTHKTLRAVRHSLIFYRKGVRSINSKGEEIMYDLERPINDAVFPGLQGGPHNHSMAGVGVGLHQAMTPEFRDYQVQVLKNAKTMAEQLMAKGYDIVSNGTDNHLVLVDLRPKGIDGSRVEFVLDQASITANKNTVPGDKSAMKPSGLRLGAAALTSRNFKENDFVKVIDLLNKGVEIGLEAQKLTKTLKEYKSIFKTNRTIMDGVDSLRQEVCQFACTFPMPGLDDL

SEQ ID NO: 10003 - DNA, 1401 bp, Hydra magnipapillata
  CDS (1)..(1401)
atgtgtgatcttaatgagcctctagagaccaatgatccagaaatattttccatccttaaaaaggaagatcacagacaaagatgtggattagaaatgattgcatcagaaaattttactagtcgtgcagttatggaatgtcttggttcctgctttactaacaagtattcagaaggaaaagtccatgcaagatattatggaggaaatgaatatattgatgaaatggaaattctttgtcaaaaaagggcattggaagcttttaggcttgataatactaaatggggtgtcaacgtgcaaccttattctggttccccagcaaactttgcagtatacactggtttattgcaaccccatgatcgcattatgggtctagaccttccagatggaggtcacctgactcacggatacatgacagaaaagaaacgaatttcagcttcttctattttttttgaatcaatgccttataaggtgaatcctgaaactggtttgattgattatgataagttacttgaaaacgcaaaacttttcaaaccgaagttaatcattgctggtgcaagtgcttattcaagaattatagactatgaacgatttcgcaaaatatgtgatgaagtaggagcaatactcatgagtgacatggcacattatagtggtcttattgttgctaatgccatacctagtccattccaacattgtgatattgtcacatctacaactcataagagcttacgcggttcacggtctggtttaatattttacaggattggggagaagtttaaagatcagcatggcaaatctgtaatgtatgattatgctactcgaattgataatgcagtatttcctactcttcaaggtggaccacacaacaataacattgctgctgttgcagtaacattaaaacaagctgcaacgccacaatttgctgagtatgctaaacaagttattaaaaatgcacaagctcttgcaaaagctttgcaagataaaggttataagattgtaacagatggcacagacacccacatgttcctaatggatgttcgaagtttggggattgatggtgcaaaagttgacacaattatggaaatggcgagcataagtgttaaccgaaatactgtacccggagacacaagcgcttttagaccaggtggtgttcgcattggtacgcctgcactcacatctcgtagttttttagaaaatgatatgttggttgtgtcagattttatacatgattgtatacaacttactcaaaaaatagagttgtctcttcatcttggaaaacaaagtttgttacgtgagtttcgagcggagcttgaaaaagaagaatggcgccaagaaataaattctattcgtcttcgagttcaaacctttgcatcaaaatttcccatgccagggtttcctgcgttttag

SEQ ID NO: 10004 - protein, 466 aa, Hydra magnipapillata
MCDLNEPLETNDPEIFSILKKEDHRQRCGLEMIASENFTSRAVMECLGSCFTNKYSEGKVHARYYGGNEYIDEMEILCQKRALEAFRLDNTKWGVNVQPYSGSPANFAVYTGLLQPHDRIMGLDLPDGGHLTHGYMTEKKRISASSIFFESMPYKVNPETGLIDYDKLLENAKLFKPKLIIAGASAYSRIIDYERFRKICDEVGAILMSDMAHYSGLIVANAIPSPFQHCDIVTSTTHKSLRGSRSGLIFYRIGEKFKDQHGKSVMYDYATRIDNAVFPTLQGGPHNNNIAAVAVTLKQAATPQFAEYAKQVIKNAQALAKALQDKGYKIVTDGTDTHMFLMDVRSLGIDGAKVDTIMEMASISVNRNTVPGDTSAFRPGGVRIGTPALTSRSFLENDMLVVSDFIHDCIQLTQKIELSLHLGKQSLLREFRAELEKEEWRQEINSIRLRVQTFASKFPMPGFPAF

SEQ ID NO: 10005 - DNA, 1287 bp, Hydra magnipapillata
  CDS (1)..(1287)
atgtgtgatcttaatgagcctctagagaccaatgatccagaaatattttccatccttaaaaaggaagatcacagacaaagatgtggattagaaatgattgcatcagaaaattttactagtcgtgcagttatggaatgtcttggttcctgctttactaacaagtattcagaaggaaaagtccatgcaagatattatggaggaaatgaatatattgatgaaatggaaattctttgtcaaaaaagggcattggaagcttttaggcttgataatactaaatggggtgtcaacgtgcaaccttattctggttccccagcaaactttgcagtatacactggtttattgcaaccccatgatcgcattatgggtctagaccttccagatggaggtcacctgactcacggatacatgacagaaaagaaacgaatttcagcttcttctattttttttgaatcaatgccttataaggtgaatcctgaaactggtttgattgattatgataagttacttgaaaacgcaaaacttttcaaaccgaagttaatcattgctggtgcaagtgcttattcaagaattatagactatgaacgatttcgcaaaatatgtgatgaagtaggagcaatactcatgagtgacatggcacattatagtggtcttattgttgctaatgccatacctagtccattccaacattgtgatattgtcacatctacaactcataagagcttacgcggttcacggtctggtttaatattttacaggattggtgttgcagtaacattaaaacaagctgcaacgccacaatttgctgagtatgctaaacaagttattaaaaatgcacaagctcttgcaaaagctttgcaagataaaggttataagattgtaacagatggcacagacacccacatgttcctaatggatgttcgaagtttggggattgatggtgcaaaagttgacacaattatggaaatggcgagcataagtgttaaccgaaatactgtacccggagacacaagcgcttttagaccaggtggtgttcgcattggtacgcctgcactcacatctcgtagttttttagaaaatgatatgttggttgtgtcagattttatacatgattgtatacaacttactcaaaaaatagagttgtctcttcatcttggaaaacaaagtttgttacgtgagtttcgagcggagcttgaaaaagaagaatggcgccaagaaataaattctattcgtcttcgagttcaaacctttgcatcaaaatttcccatgccagggtttcctgcgttttag

SEQ ID NO: 10006 - protein, 428 aa, Hydra magnipapillata
MCDLNEPLETNDPEIFSILKKEDHRQRCGLEMIASENFTSRAVMECLGSCFTNKYSEGKVHARYYGGNEYIDEMEILCQKRALEAFRLDNTKWGVNVQPYSGSPANFAVYTGLLQPHDRIMGLDLPDGGHLTHGYMTEKKRISASSIFFESMPYKVNPETGLIDYDKLLENAKLFKPKLIIAGASAYSRIIDYERFRKICDEVGAILMSDMAHYSGLIVANAIPSPFQHCDIVTSTTHKSLRGSRSGLIFYRIGVAVTLKQAATPQFAEYAKQVIKNAQALAKALQDKGYKIVTDGTDTHMFLMDVRSLGIDGAKVDTIMEMASISVNRNTVPGDTSAFRPGGVRIGTPALTSRSFLENDMLVVSDFIHDCIQLTQKIELSLHLGKQSLLREFRAELEKEEWRQEINSIRLRVQTFASKFPMPGFPAF

SEQ ID NO: 10007 - DNA, 1404 bp, Schizosaccharomyces japonicus yFS275
  CDS (1)..(1404)
atgtctgttaccaacgaacaactctttttgactcccttggccgagcaagaccctaaggtcgccgagatcatgaagaatgaggagcaacgtcaacgtagctccatcaacctcattgcttctgagaactttacctctcgtgctgtcatggatgctcttggaagtgtcatgagcaacaagtactctgagggttaccccggtgcccgttactacggtggtaaccaattcatcgatcaaatcgagaccttgtgtcaagagcgtgccctcaaggctttcaacgttactgctgacaagtggggcgttaacgttcagtgcttgtccggttcccccgccaacttggaggtttaccaggctatcatgcctcctcacagccgtcttatgggtcttgaccttccttcgggtggtcacttgtcccacggttaccaaaccgatgcccgtaagatcagtgccgtctctacctatttcgagtccatgccctaccgtgtcgaccccgagaccggtatcattgactacgacaccttggccaagaacgctcagctcttccgccctaaggttctcgttgctggtacctctgcttactgccgtttgatcgactacaagcgcatgcgcgagatcgccgacagtgtcaacgcctacctcatggttgacatggctcacatttccggtctcgtctccgctggtgttattccctctcccttcgagtacgctgacattgtcaccaccaccactcacaagtctcttcgtggtccccgtggtgctatgatcttcttccgccgcggtctccgcaagcatgacaagaagggtaaccccgtctactacgacttggaggacaagattaacttctctgtcttccctggtcaccaaggtggtccccacaaccacaccatcactgctctcgctgttgccttgaagcaatgcgacactcctgcctacaaggcataccaagctcaagtcgtgaagaacgccaaggcctgcgagaacgagttcaagaagctcggctacaagttggccgctgacggtaccgacagccacatggttcttgtcaacgtcaagagcaagcacggtattgatggtgctcgtgctgagcgtgttcttgagctcatcaacgttgtcaccaacaagaacactctcccctccgacaagtctgctttgtctccctctggtatccgtgtcggtacccctgccatgactactcgtggcttcaaggagcaagacttcctccgtgttgttgacttcatcgaccgtgctctcaccattgccgccgacctccaaaagagccttcccaaggaggccaacaagttgaaggacttcaaggccgctcttggtgagggtgagaacatccccgagcttgccgccttgaagaaggaggttatcgagtggacttctgctcttcctcttgctgcttaa

SEQ ID NO: 10008 - protein, 467 aa, Schizosaccharomyces japonicus yFS275
MSVTNEQLFLTPLAEQDPKVAEIMKNEEQRQRSSINLIASENFTSRAVMDALGSVMSNKYSEGYPGARYYGGNQFIDQIETLCQERALKAFNVTADKWGVNVQCLSGSPANLEVYQAIMPPHSRLMGLDLPSGGHLSHGYQTDARKISAVSTYFESMPYRVDPETGIIDYDTLAKNAQLFRPKVLVAGTSAYCRLIDYKRMREIADSVNAYLMVDMAHISGLVSAGVIPSPFEYADIVTTTTHKSLRGPRGAMIFFRRGLRKHDKKGNPVYYDLEDKINFSVFPGHQGGPHNHTITALAVALKQCDTPAYKAYQAQVVKNAKACENEFKKLGYKLAADGTDSHMVLVNVKSKHGIDGARAERVLELINVVTNKNTLPSDKSALSPSGIRVGTPAMTTRGFKEQDFLRVVDFIDRALTIAADLQKSLPKEANKLKDFKAALGEGENIPELAALKKEVIEWTSALPLAA

SEQ ID NO: 10009 - DNA, 1383 bp, Schizosaccharomyces japonicus yFS275
  CDS (1)..(1383)
atgattcaagctcctttggaggaatgtgatccagaaatgtctcgcattctcaagtcagaggaagcccgccaaaaacaatccatcgctcttatcgcttctgagaacttcacttctcgtgctgtcatggatgcccttggaagtattatgcaaaacaagtactcagagggttatcccggtgctcgttactatggcggaaacgagttcattgaccagggcgagcgtttgtgccaaaagagagcactcgaggcctaccgtttggacccagaacaatggggcgtcaatgtgcaaccccattctggctctcccgccaatctccaagtgtaccaagccgtgttgaaaccccacgagcgtcttatgggtcttgacttgcctcacggaggtcacttgtctcatggattctccactcctcaaaaggctatttctgcagtctctacatacttcacgaccatgccttaccgcgtgaacccaagcaccggcatcatcgactacgacacgctggagcaagacgtgcagttgttccgccccaaggttatcgtggccggtgccagtgcctacgctcgtctgatcgactacgagcgtatgagaaagatcgccgacagtgtcaacgcttaccttatgtccgatatggcacatatttccggtttggttgctgctggtgtaattccttctccattcgaatactctgatatcgtgacgactactacacacaagtcgcttcgtggtcctcgtggtgccatgatcttctaccgtcgtggtgtccgcaagcacgacaagaagggcaacgctgtcatgtacgacttggaagataaaattaatttctccgtctttcccggtcatcaaggtggtcctcacaaccatactatctcggctttggctgtcgccctcggtcaagcaaagacacccgagttccgtgcttatcaagaaagcgtgctgcgcaacgcaaaggccctcgagagagcgttccttgcacgcaattacgaactcgtttctggcggcaccgacacacatcttgtcttggttaacttgaccagcaagggcattgatggcgctcgtgtggagcgtgtgctagaattgattaatatctctgccaacaagaacaccgttcccggcgacaagtctgccctcattcctcacggacttcgtctcggtacacccgcttgcacaacccgcggcttcaatgagcaagattttgaacgcgttgttgactatattgaccaagccgttgctctgaccaagcaaattaacgcggatgctaagaaaaccggaaagaacaaactgagtgacttcaagcagttcctcggcgatggctctcaataccccgaaatccaacgtctcaaatctgaaattggcagctgggctagcggttttgaattccccatttag

SEQ ID NO: 10010 - protein, 460 aa, Schizosaccharomyces japonicus yFS275
MIQAPLEECDPEMSRILKSEEARQKQSIALIASENFTSRAVMDALGSIMQNKYSEGYPGARYYGGNEFIDQGERLCQKRALEAYRLDPEQWGVNVQPHSGSPANLQVYQAVLKPHERLMGLDLPHGGHLSHGFSTPQKAISAVSTYFTTMPYRVNPSTGIIDYDTLEQDVQLFRPKVIVAGASAYARLIDYERMRKIADSVNAYLMSDMAHISGLVAAGVIPSPFEYSDIVTTTTHKSLRGPRGAMIFYRRGVRKHDKKGNAVMYDLEDKINFSVFPGHQGGPHNHTISALAVALGQAKTPEFRAYQESVLRNAKALERAFLARNYELVSGGTDTHLVLVNLTSKGIDGARVERVLELINISANKNTVPGDKSALIPHGLRLGTPACTTRGFNEQDFERVVDYIDQAVALTKQINADAKKTGKNKLSDFKQFLGDGSQYPEIQRLKSEIGSWASGFEFPI

SEQ ID NO: 10011 - DNA, 1416 bp, Branchiostoma floridae
  CDS (1)..(1416)
atgactaacggccactctgcaggggactggtgggacctcaccaaacctgtgggggaagtggacccggaaatcactgccatcatccgcaaggaaaaggaccgtcagaggagggaattggaaatgatcgcttcagagaactttgccagtgctgcttgtctacaggccatgggctcatgtctcaacaacaagtactctgagggctaccctggacagaggtactatggaggcaccaagtttgtggatgagattgaagtcctgtgccaaaagagagccctgtcagtgtatggtctggacccagagaagtggggagttaatgtgcagccttattctgggtctcctgccaactttgctgtcttcacagctattgtggagccacatggaaggatcatgggtctggatctccctgatggaggccatctcacccatggcttcatgacagacaagaagaagatctctgccacctctgtgttcttcgagtccatgccctacaaggtggacccaaagactgggctgattgattatgagaggcttcgggagaatgcaaagatcttccacccaaggatgatcattgctggtatcagttgctactccaggaacctggactatgccaagttccgtgagattgcagacgagaacaacgcctacctgctggcggacatggcgcacatctcaggactggtggccgcaggggccgtgccctctcccttcgagcactgcgacattgtgacgaccaccacacacaagaccctgcgtggtgtcagggcagggatgatcttcttcaggaaaggtgtaaggagtgttgggaaggatgggaagcccatcatgtataacctggagtctcccatcaaccaggctgtgtttcctgggcttcaggggggaccacataaccatgctattgcaggtgttgctgtggccctgaaacaggctgccatgccagagtttaagacctacatacaacaggtcattaagaactgccaggctatgtgtaaaatgatgatggacaagggataccatgtggtaacagatggttcagataaccacctgctgctgatagacctgaggtcaaagggcatcaatggttctaagacagagaagatcttggaggaggtctccatcgcttgtaataagaacacttgtccaggtgacaagagtgccctgaaccccagtggtctgcgttttggaacaccagccctgacatcccgcggttttgtggagaaggactttgagaaagttacagactttattgacagagcgatcctgctggctgttgagatccagacagtgtctggtaagatgctgaaggacttcaaggctaagatggtggaggaaccattctcgtccaagattgctgccctccgtgctgaagtggaggcattcgccatcgctttccccatccctggactggaggacatgtaa

SEQ ID NO: 10012 - protein, 471 aa, Branchiostoma floridae
MTNGHSAGDWWDLTKPVGEVDPEITAIIRKEKDRQRRELEMIASENFASAACLQAMGSCLNNKYSEGYPGQRYYGGTKFVDEIEVLCQKRALSVYGLDPEKWGVNVQPYSGSPANFAVFTAIVEPHGRIMGLDLPDGGHLTHGFMTDKKKISATSVFFESMPYKVDPKTGLIDYERLRENAKIFHPRMIIAGISCYSRNLDYAKFREIADENNAYLLADMAHISGLVAAGAVPSPFEHCDIVTTTTHKTLRGVRAGMIFFRKGVRSVGKDGKPIMYNLESPINQAVFPGLQGGPHNHAIAGVAVALKQAAMPEFKTYIQQVIKNCQAMCKMMMDKGYHVVTDGSDNHLLLIDLRSKGINGSKTEKILEEVSIACNKNTCPGDKSALNPSGLRFGTPALTSRGFVEKDFEKVTDFIDRAILLAVEIQTVSGKMLKDFKAKMVEEPFSSKIAALRAEVEAFAIAFPIPGLEDM

SEQ ID NO: 10013 - DNA, 1530 bp, Branchiostoma floridae
  CDS (1)..(1530)
atgttacgatcggctgcaaccgctgtccttactaaggcgttcaggacgaattgccaactcttgccccgtgtcacgacaagtgtttcccagcagcgatgggttatgtcagccactgcacaggaccaggatgacaaagtgtggacagggcaggagagcctggctgactcggaccctgacatgtggggactgctgcagaaggagaaggacagacagctccgaggactggaactcatcgcttccgagaatttctgcagcaaggcggccctggaagctctgggttcctgtctgaacaacaagtactctgaagggtacccaggacagaggtactacggaggagcggagatcgtggaccagattgagctcctgtgtcagcagcgggcccagcaggccttccgtctggacccggagaagtggggagtgaacgtccagccgtactccggctctcccgccaacttcgctgtctacaccgcgctgctgaaccctcacgacagggtcatgggcctggacctgcctgatggtggacatctcacccacggttttatgactgacaccaagagaatctctgcaacctccatctactttgagtccatgccgtacaggctgaacccccagacaggtctgattgactatgacaagctggaggagacagcgcgactattccgtcctcggatgatcatcgcgggaaccagcgcctacgccaggcttatcgactacaaaaaaatgcgagagatctgtgatgagcacggtgcctacctgttggcagacatggcgcacatctcaggcctggtggctgctggggtcatccccagccccttcgagtacgctgatgttgtcacaactaccactcacaaaaccctgcgaggggcaagagctgggctgatctttttccgccgtggggtcaagggtcagaacaagaagacggggaaagacatcatgtacgactttgagcgcaggatcaacttcgctgtgttcccgtctctgcaaggaggtccccacaaccatgccatcgctgctgtggctgtggcacttaaacaggcccagactcccatgttccgtgagtaccaggaacaggtgatgagcaacaccaaggccatggctgaatctctgatgtcgaaaggctacaaattagtctcagatggcacagataaccaccttgtcctggtggacctgcgtccgaagggcatcgacggagctcgtgtggagcgtgtgtgtgaactggcctccatcacctgcaacaagaacacctgtcctggggacaagagtgcgctcacacctgggggactcaggctgggagccccagctctgacatcacgttgtatgaaggaagacaacttccgtcaggtggtggactttatcgacgaggctgtgcagattggtctgcaggtcaaggacaagactgggcccaagatggtggatttcaagaagttcctcctggaagatgaagagactgttggcaggatctccgacctgcgtgctcgtgtggagagtttcgctcgcacatttcctatgccaggctttgatgaccattaa

SEQ ID NO: 10014 - protein, 509 aa, Branchiostoma floridae
MLRSAATAVLTKAFRTNCQLLPRVTTSVSQQRWVMSATAQDQDDKVWTGQESLADSDPDMWGLLQKEKDRQLRGLELIASENFCSKAALEALGSCLNNKYSEGYPGQRYYGGAEIVDQIELLCQQRAQQAFRLDPEKWGVNVQPYSGSPANFAVYTALLNPHDRVMGLDLPDGGHLTHGFMTDTKRISATSIYFESMPYRLNPQTGLIDYDKLEETARLFRPRMIIAGTSAYARLIDYKKMREICDEHGAYLLADMAHISGLVAAGVIPSPFEYADVVTTTTHKTLRGARAGLIFFRRGVKGQNKKTGKDIMYDFERRINFAVFPSLQGGPHNHAIAAVAVALKQAQTPMFREYQEQVMSNTKAMAESLMSKGYKLVSDGTDNHLVLVDLRPKGIDGARVERVCELASITCNKNTCPGDKSALTPGGLRLGAPALTSRCMKEDNFRQVVDFIDEAVQIGLQVKDKTGPKMVDFKKFLLEDEETVGRISDLRARVESFARTFPMPGFDDH

SEQ ID NO: 10015 - DNA, 1530 bp, Branchiostoma floridae
  CDS (1)..(1530)
atgttacgatcggctgcaaccgctgtccttactaaggcatttaggacaaattgccaactcttgccacgtgtgacgacaagtgtatcccagcagcgatggatcatgtctgccactgcacaggaccaggatgagaaggtgtggacagggcaggagagcctggctgactcggaccctgacatgtggggtctgctgcagaaggagaaggacagacagctccgaggactggaactcatcgcttccgagaatttctgcagcaaggcggccctggaagctctgggttcctgtctgaacaacaagtactctgaagggtacccaggacagaggtactatggaggagcagaaatcgtggaccagattgagctcctgtgtcagcagcgggcccagcaggccttccgtctggacccggagcggtggggagtgaacgtccagccctactccggctctcccgctaactttgctgtctacactgcattgctgaacccacatgacagggtcatgggtctggacttgcctgatggtggacatctcacccatggtttcatgactgacaccaagagaatctctgcaacctccatctactttgaatccatgccatacaggctgaacccccagacaggtctgattgactatgacaagctggaggagacagcgcgactattccgtccacggatgatcatcgcgggaaccagcgcctacgccaggctgatcgactacaaaaggatgcgagagatctgtgatgagcacggtgcctacctgttggcagacatggcgcacatctcaggcctggtggctgctggggtcatccccagcccattcgagtacgctgatgtcgtcacaactaccactcacaaaaccctgcgaggggcaagagctggcctgatctttttccgccgcggggtcaaaggtcagaacaagaagacggggaaggacatcatgtacgactttgagcgcagaatcaattttgccgtgttcccatctctgcaaggaggtccccacaatcatgccatcgctgctgtggctgtggcactaaaacaggcgcagacacccatgttccgtgagtaccaggaacaggtgatgagcaacaccaaggccatggccgagtctctgatgtccaaaggctacaaactagtctcagatggcacagacaaccaccttgttctagtggacctgcgtccgaagggcatcgacggagctcgtgtggagcgggtgtgtgaactggcctccatcacctgcaacaagaacacctgtcctggggacaagagtgcgctcacacctggaggactcaggctgggagctccagcgctgacgtcacgttgtatgaaggaagacaacttccgtcaggtggtggactttattgacgaggctgtgcagattggtctacaggtcaaggacaagactggtcccaagatggtggatttcaagaagttcctcctggaagatgaagagactgttggcaggatctctgacctgcgtgctcgtgtggagagtttcgctcgcacatttcctatgccaggcttcgatgaccattaa

SEQ ID NO: 10016 - protein, 509 aa, Branchiostoma floridae
MLRSAATAVLTKAFRTNCQLLPRVTTSVSQQRWIMSATAQDQDEKVWTGQESLADSDPDMWGLLQKEKDRQLRGLELIASENFCSKAALEALGSCLNNKYSEGYPGQRYYGGAEIVDQIELLCQQRAQQAFRLDPERWGVNVQPYSGSPANFAVYTALLNPHDRVMGLDLPDGGHLTHGFMTDTKRISATSIYFESMPYRLNPQTGLIDYDKLEETARLFRPRMIIAGTSAYARLIDYKRMREICDEHGAYLLADMAHISGLVAAGVIPSPFEYADVVTTTTHKTLRGARAGLIFFRRGVKGQNKKTGKDIMYDFERRINFAVFPSLQGGPHNHAIAAVAVALKQAQTPMFREYQEQVMSNTKAMAESLMSKGYKLVSDGTDNHLVLVDLRPKGIDGARVERVCELASITCNKNTCPGDKSALTPGGLRLGAPALTSRCMKEDNFRQVVDFIDEAVQIGLQVKDKTGPKMVDFKKFLLEDEETVGRISDLRARVESFARTFPMPGFDDH

SEQ ID NO: 10017 - DNA, 1416 bp, Vitis vinifera
  CDS (1)..(1416)
atggatccagtatcagaatggggaaactcaagcctcctcacagtggatccagagatccatgacctgatcgagaaggaaaagaggaggcagtgcagggggatagagctgattgcctccgagaatttcacatcctttgccgtcattgaagccctgggcagcgccctcaccaacaagtactccgagggcatgcctggcaaccgctactatggtggaaatgagttcatcgacgagatcgagaacctctgcaggtcacgtgccctgcaggccttccactgcgacccctccaagtggggcgtcaatgttcagccctactccggctcccccgccaatttcgccgcctacaccgccattctcaacccccacgaccgcatcatgggtttggacctcccttccggtggccacctcacccacggctactacacctccagcggaaagaagatctcggccacttccatttactttgagagtttgccttataaggtcagctccaccactggctacattgattacgatcgcttggaggagaaggccttggatttcaggcctaagttaatcatttgcggtggcagcgcctaccccagggactgggattacgccaggttccgctctattgccgataagtgtggcgctttgttgctttgtgacatggcccacattagtggccttgttgctgctcaggaagccgcaaacccctttgagtattgtgacatagtcacaactacaacccacaagagcctgaggggcccaagggctggtatgatcttctaccgtaagggtcctaaaccacccaagaagggccagccggaagatgcagtttatgattttgaggacaaggtcaattttgctgttttcccctccctccaaggtggcccccacaatcaccagattgctgccctagctgttgccttgaagcaggccatggttcccgggttcaaggcctatgctaagcaagtcaaggccaatgcagttgcccttggaaactacctgatgagcaagggatacaagcttgttactggtgggactgagaaccaccttgttctatgggatctccgccctctcggtttgactggcaacaaagttgagaaactttgtgatctgtgcaacattacagtgaacaagaatgctgtgtttggtgacagcagtgccttggctcctggaggtgtacgcattggtgctcctgccatgacttcaaggggtttggttgagaaggactttgagcagatagcagagttcctgcatagggctgtgaccatcaccttaaagatccaaaaggagcatgggaaacttttgaaggatttcaacaagggccttgttaacaataaggatatcgaggagctgaaggttgatgttgagaagttttcagcctcatttgagatgcctggattttcagtgtctgagatgaagtacaaggattag

SEQ ID NO: 10018 - protein, 471 aa, Vitis vinifera
MDPVSEWGNSSLLTVDPEIHDLIEKEKRRQCRGIELIASENFTSFAVIEALGSALTNKYSEGMPGNRYYGGNEFIDEIENLCRSRALQAFHCDPSKWGVNVQPYSGSPANFAAYTAILNPHDRIMGLDLPSGGHLTHGYYTSSGKKISATSIYFESLPYKVSSTTGYIDYDRLEEKALDFRPKLIICGGSAYPRDWDYARFRSIADKCGALLLCDMAHISGLVAAQEAANPFEYCDIVTTTTHKSLRGPRAGMIFYRKGPKPPKKGQPEDAVYDFEDKVNFAVFPSLQGGPHNHQIAALAVALKQAMVPGFKAYAKQVKANAVALGNYLMSKGYKLVTGGTENHLVLWDLRPLGLTGNKVEKLCDLCNITVNKNAVFGDSSALAPGGVRIGAPAMTSRGLVEKDFEQIAEFLHRAVTITLKIQKEHGKLLKDFNKGLVNNKDIEELKVDVEKFSASFEMPGFSVSEMKYKD

SEQ ID NO: 10019 - DNA, 1587 bp, Vitis vinifera
  CDS (1)..(1587)
atgcaggcttgtagtggaactgctgctatgggttctctgcaacagcccatttggattaaggggtcaagttttgctccaaatgggtctactgtcaatgggttcccacaccaaattaaactgaactcggttaagccatgtagatcttatatcaaaggaagcttggttactgggaagccaccttcctctgtgtctgtcactgtgcctggaaatggggatagtggagtcaattttattgaccatggcttgaatgaagctgatcctgaagtgtgtgcaattatttacaaggaaaagcaacggcaaatgaaaagcttagaacttattgcctcagagaatttcacatcccgggcagtgatggaagctgttggttcttgcctcacaaacaaatattctgagggattgcctggtaaaaggtactatggtggtaatgagttcattgatgagctggaaactctgtgtcagaagagggctttggcagcattccacttagatggaaagaagtggggtgtcaatgttcaaccattgtctggttctccagctaactttgaagtatacactgcccttctcaatccacatgacagaatcatgggcttggacttacctcatgggggccacttgtctcatggtttcatgactcctaaaagacgggtatcaggcacatcaatttattttgagtctatgccttatcgacttgatgaatctacaggtcttgttgattatgacatgcttgagaaaacagctaatctttttcgaccaaaactcattattgctggtgctagtgcttatcctcgagattttgattatcctcgtatgaggaagattgcagatggtgttggtgcttttctcatgatggatatggctcacattagtggacttgttgctgcttctgtggttgctgacccctttgagtactgtgatattgtgacaacaacaacacacaagtctcttagaggtcctagaggtggcatgatcttcttcaagaaagattctgttctgggagttgacttagaatctgccatcaacaatgctgtttttccaggtttacagggtggtccgcataaccacacaatcgggggactttcagtctgcttaaagcatgcccaatccccagaattcaaggcttaccagaaccaggtagtgtcaaactgtagagctcttgctggccggttaatcgaattgggatataacctggtttccgggggaagtgataaccaccttattcttgtggatcttaggccattgggtattgatggggctcgggcggagaagattcttgacatggcttctatcaccctcaacaagaattcagtgcctggcgacaagagtgccctcgtgcctggtggcattcgcatcggatcacctgcgatgactaccaggggattctccgagaaggaattcatagcaactgcagatttcattcacgagggcgtgcagctatctcttgaagcaaaaaaatcggtttcaggatcaaagctcctagacttcatgaagtttgtaacgtccccagatttctctttgatagaccgggtgtcggatttgcagaggagagtcgaaactctcacaacccagttcccaatgcctggattataa

SEQ ID NO: 10020 - protein, 528 aa, Vitis vinifera
MQACSGTAAMGSLQQPIWIKGSSFAPNGSTVNGFPHQIKLNSVKPCRSYIKGSLVTGKPPSSVSVTVPGNGDSGVNFIDHGLNEADPEVCAIIYKEKQRQMKSLELIASENFTSRAVMEAVGSCLTNKYSEGLPGKRYYGGNEFIDELETLCQKRALAAFHLDGKKWGVNVQPLSGSPANFEVYTALLNPHDRIMGLDLPHGGHLSHGFMTPKRRVSGTSIYFESMPYRLDESTGLVDYDMLEKTANLFRPKLIIAGASAYPRDFDYPRMRKIADGVGAFLMMDMAHISGLVAASVVADPFEYCDIVTTTTHKSLRGPRGGMIFFKKDSVLGVDLESAINNAVFPGLQGGPHNHTIGGLSVCLKHAQSPEFKAYQNQVVSNCRALAGRLIELGYNLVSGGSDNHLILVDLRPLGIDGARAEKILDMASITLNKNSVPGDKSALVPGGIRIGSPAMTTRGFSEKEFIATADFIHEGVQLSLEAKKSVSGSKLLDFMKFVTSPDFSLIDRVSDLQRRVETLTTQFPMPGL

SEQ ID NO: 10021 - DNA, 1416 bp, Populus trichocarpa
  CDS (1)..(1416)
atggatccagtcactgcatggggaaacacctccctggaatcagtggacccagaaatccacgacttgatcgagaaggaaaaacgccggcaatgcagaggtatcgagctcatcgcttcagaaaatttcacatctttcgccgttatagaggcccttggcagcgctctgactaataagtactcagagggtatgccaggaaaccgctactacggcgggaatgaatatattgatcagattgaaaatctctgcagatctcgggctcttgaagcttttcatttagaccccacaaaatggggtgtaaatgttcagccatattcaggttctcctgcaaattttgctgcttatacagcagttcttcagccccatgacagaatcatggggttggatttgccttctggagggcatttgactcatgggtattacacatctgggggcaagaagatttcagctaccagtatttattttgagagtttgccttacaaggtgaattcgcaaagtgggtatattgattatgataaattggaggagaaggctctagattttaggcctaagcttattatttgtggtggaagtgcttatccgagagattgggattataaaaagtttagatctgtcgctgataagtgtggtgctcttttgctttgtgatatggctcacatcagtggccttgttgctgctcaggaagctgccaacccctttgagtactgtgacatagtcaccaccactacccacaaaagtttgaggggtcctagggctggtatgatcttctatcgcaagggccctaaaccaccaaagaagggtcagccagagaatgcggtttatgacttcgaagacaagatcaactttgctgttttcccatctcttcagggcggtccccacaatcaccagatcggtgctctggctgttgccttgaaacaggtccaaacccctgggttcaaggcctatgccaaacaagtcaaggcaaatgccgttgcccttggaaactacttgatgggccagggatacaagcttgttactgaaggaactgagaaccacctcgttctgtgggatcttagaccccttggattgacaggcaacaaggtcgaaaagctctgtgaccttgcaaacatcaccgtcaacaaaaatgccgtgtttggtgacagcagtgctttggctccgggaggagtaagaattggtacccccgccatgacttcaagaggtttggtagagaaggatttcgaacagattggagagttcctccaccgtgctgtgaccatcacgctgagcatccaaaaggaatatggaaagctcttgaaggacttcaacaagggtctggtgaacaacaaggacattgaggcactcaaggctgatgttgaaaagttttctggctccttcgacatgcctgggtttcagatgtctgagatgaagtacaaggattag

SEQ ID NO: 10022 - protein, 471 aa, Populus trichocarpa
MDPVTAWGNTSLESVDPEIHDLIEKEKRRQCRGIELIASENFTSFAVIEALGSALTNKYSEGMPGNRYYGGNEYIDQIENLCRSRALEAFHLDPTKWGVNVQPYSGSPANFAAYTAVLQPHDRIMGLDLPSGGHLTHGYYTSGGKKISATSIYFESLPYKVNSQSGYIDYDKLEEKALDFRPKLIICGGSAYPRDWDYKKFRSVADKCGALLLCDMAHISGLVAAQEAANPFEYCDIVTTTTHKSLRGPRAGMIFYRKGPKPPKKGQPENAVYDFEDKINFAVFPSLQGGPHNHQIGALAVALKQVQTPGFKAYAKQVKANAVALGNYLMGQGYKLVTEGTENHLVLWDLRPLGLTGNKVEKLCDLANITVNKNAVFGDSSALAPGGVRIGTPAMTSRGLVEKDFEQIGEFLHRAVTITLSIQKEYGKLLKDFNKGLVNNKDIEALKADVEKFSGSFDMPGFQMSEMKYKD

SEQ ID NO: 10023 - DNA, 1668 bp, Populus trichocarpa
  CDS (1)..(1668)
atggatttaacacaagcagcgcaatcaggtctctcgcttcgatttcactcaagttcaattccaattcaactgcaattactcgatcaaaaacaagagacccacatcgataacgaagaaaaccaaacagaagatgaacaatttagcattttgggtcatcaagtgtgtataaagagaccaagagataacagttctcaatcatcatcttcatcatcgacgacaagttcttccaaacgggttgctatggatccgggtttggagtctcgtcgggccatggttcgggcatggggtaaccaccgtcttcccgtcgcggatcctgaaattcatgagattatggagaaagagaagcaaaggcagtttaaaggtattgaattgattgcatctgagaattttgtttgccgtgcagttatggaagctcttggtagtcatttaactaataaatattcggagggattgcctggttccagatactatacgggaaatcaatatattgatcaaattgaattgatttgttggagccgcgcgctggcagcttttggacttgattctgataaatggggtgttaatgtgcagccatattcgtgtacttcagcgaatttttctgttttcactgggcttttattgcctggggataggatcatggggttagactcgccttctggagggcatttaagtcatgggtattatacacctggagggaagaatgtgtcagcttcgtcaatattttttgagagtctgccatataaagtgaatccacaaaccgggtatattgattatgataagatggaggagaaggctatggattttagacctaagatactgatctgtggtgggagttcgtacccgagggagtgggattatgcgaggtttagacaagttgctgataagattggtgctgttttgatgtgtgatatggctcacattagcgggctcgtagcagctaaggaatgtgtaagtccatttgaatattgtgatattgttacctctacaacacacaaaagtcttcgaggtcctagaggggggattattttttataggaaaggcccaaaattgaggaagcagggcatgcttcttagtcatggtgatggtatcagccattatgattttgaagaaaagataaattttgcagtccatccatcaacacaagggggtcctcacaataatcacatcgctgctcttgccatagccttaaaacaagtggccacaccagagtacaaagcatatatgcaacaggtgaggaaaaatgctcaggcattagcatctgctttgttgagaagaaaatgcagactcgtgactggtgggactgataaccatttgttgctgtgggatctaactgcttggggattaacaggcaagtgttatgagaaggtgtgtgaaatgtgccacatcactctaaataaaagtgccatatttggtgacaatggtgcgatctgtcctggaggagtgagaattggtgctcctgctatgacatcaagaggttgcatagaggctgattttgagacgattgctgactttcttcttaaggctgctcagattactactgttgtgcagagggaacatggaaaaaaggatttcctcaaaggtcttcataacaatagagatattgttgagcttcgaaaccgggttgagatttttgcttctcagtttgccatgccaggatttgacatttga

SEQ ID NO: 10024 - protein, 555 aa, Populus trichocarpa
MDLTQAAQSGLSLRFHSSSIPIQLQLLDQKQETHIDNEENQTEDEQFSILGHQVCIKRPRDNSSQSSSSSSTTSSSKRVAMDPGLESRRAMVRAWGNHRLPVADPEIHEIMEKEKQRQFKGIELIASENFVCRAVMEALGSHLTNKYSEGLPGSRYYTGNQYIDQIELICWSRALAAFGLDSDKWGVNVQPYSCTSANFSVFTGLLLPGDRIMGLDSPSGGHLSHGYYTPGGKNVSASSIFFESLPYKVNPQTGYIDYDKMEEKAMDFRPKILICGGSSYPREWDYARFRQVADKIGAVLMCDMAHISGLVAAKECVSPFEYCDIVTSTTHKSLRGPRGGIIFYRKGPKLRKQGMLLSHGDGISHYDFEEKINFAVHPSTQGGPHNNHIAALAIALKQVATPEYKAYMQQVRKNAQALASALLRRKCRLVTGGTDNHLLLWDLTAWGLTGKCYEKVCEMCHITLNKSAIFGDNGAICPGGVRIGAPAMTSRGCIEADFETIADFLLKAAQITTVVQREHGKKDFLKGLHNNRDIVELRNRVEIFASQFAMPGFDI

SEQ ID NO: 10025 - DNA, 1551 bp, Populus trichocarpa
  CDS (1)..(1551)
atggccattgctcttcgcaggctctcttcctccctcaggaacccaatcaaaccttacctcaatggcggttctctctattacaacatgtcttctttgcctcataaagctctgcccgacgaagacaaagctcgcgccaattggataaagcaattgaatgctccgttagaggaaatcgatccggaaattgctgacatcatcgaactcgagaaagcaaggcaatggaagggattggaactcattccttcagagaatttcacgtcggtgtcggtgatgcaagcggttggttcggttatgaccaataaatacagtgaagggtacccgggggctagatattatggaggaaatgagtacattgacatggctgagacgttatgtcagaagcgtgcattagaagcttttgggttggatcctcaaaaatggggagtcaacgtgcagtcactatctggatcccctgctaactttcaagtttacacggcactgctgaaacctcatgagagaatcatggcacttgatctgccacatggtgggcatctttcacatggttatcagactgacacaaagaagatatctgctgtatccatattttttgagacaatgccatacagattgaatgagagtacaggctatgtggactatgatcagctggagaaaagtgccacactctttagaccaaaacttatagttgctggtgcaagtgcttatgctcgcctttatgactatgcacgtatccgtaaggtctgtgacaagcaaaaggcagttttgttggctgatatggcacacatcagtgggcttgttgcagcaggtgttattccatctcctttcgaatatgcagatgtcgttacaaccaccacacacaagtcacttcgaggtccacggggggctatgatcttcttcaggaagggggtgaaagaaattaacaaacaagggaaagaagtgatgtatgactatgaagacaaaatcaatcaggcagtctttcctggacttcaaggtggtcctcacaatcataccatatctggtttagcggttgcactaaagcaggcgagaactccagagtacaaggcctaccaagagcaagttctcagcaactgttcaaaatttgctcagagcttgatagagaagggctatgaactggtatctggtggcactgagaaccatctagtcctggtgaatttaagaaacaagggtattgatggatcaagagttgaaaaggttctggaattagtccacattgcagctaataaaaacactgttcctggagatgtatctgccatggttcctggtggaattcgtatgggaacccctgctctcacttcaaggggttttattgagagagattttgtgaaagtagctgagttctttgatgctgctgtgaagttggccttgaagatcaaggcagatgcacaaggaatgaagttgaaggattttgtagcagccatgaagtcagatggacatcaatctgagattgcaaggctccgtcatgatgttgaagagtatgcaaagcaattccctacagttggatttgagaaggaaacaatgaaatacaaggactga

SEQ ID NO: 10026 - protein, 516 aa, Populus trichocarpa
MAIALRRLSSSLRNPIKPYLNGGSLYYNMSSLPHKALPDEDKARANWIKQLNAPLEEIDPEIADIIELEKARQWKGLELIPSENFTSVSVMQAVGSVMTNKYSEGYPGARYYGGNEYIDMAETLCQKRALEAFGLDPQKWGVNVQSLSGSPANFQVYTALLKPHERIMALDLPHGGHLSHGYQTDTKKISAVSIFFETMPYRLNESTGYVDYDQLEKSATLFRPKLIVAGASAYARLYDYARIRKVCDKQKAVLLADMAHISGLVAAGVIPSPFEYADVVTTTTHKSLRGPRGAMIFFRKGVKEINKQGKEVMYDYEDKINQAVFPGLQGGPHNHTISGLAVALKQARTPEYKAYQEQVLSNCSKFAQSLIEKGYELVSGGTENHLVLVNLRNKGIDGSRVEKVLELVHIAANKNTVPGDVSAMVPGGIRMGTPALTSRGFIERDFVKVAEFFDAAVKLALKIKADAQGMKLKDFVAAMKSDGHQSEIARLRHDVEEYAKQFPTVGFEKETMKYKD

SEQ ID NO: 10027 - DNA, 1659 bp, Populus trichocarpa
  CDS (1)..(1659)
atggatttaacacaagcagcacaatcaggtctctcacttggatttcactcaagtccaattccactacaattactcgatcaaaaacaagaaacccgcatcgataacgaagagaatcaaaccgaagatgagcaatttagcattttgggtcaccaaatgtgtataaagagaccgagagataacagttctcaatcatcagcgtcatcgtcgacgacaaattcttccaaacgggttgccatggaccctggtttggagtctcgtcgggccatggttcgggcatggggaaaccacccgcttccaatcgcagatcctgagattcatgagattatggagaaggagaagcaaaggcagtttaaaggtattgaattgattgcgtctgagaattttgtttgccgtgctgttatggaagctcttggtagtcatttaactaataaatattctgagggattgcctggttccagatattatacgggaaatcaaaatattgatcaaattgaattgatttgttggagtcgcgccttggcagcttttggacttgattctgataaatggggtgttaatgtgcagccatattcctgtacttcagcgaattttgctgtttacacagggcttttgttgcctggggataggatcatggggttagattctccttctggaggacatttgagtcatgggtattatacaccgggagggaaaagggtctcggcttcttcgattttttttgagagtctgccttataaagtgaacccgcaaactgggtatattgattatgataagatggaggagaaggctatggattttagacctaagatactgatctgtggtgggagttcctatccgagggagtgggattatgcgaggtttagacaagttgctgataggattggtgctgttttgatgtgtgatatggctcacattagcgggcttgtggcagctaaggaatgtgttagtccatttgaatattgtgatattgttacctctacaactcacaaaagccttcgaggtcctagaggggggattattttttataggaaaggcccaaaattgaggaagcagggcatgcttagtcatggtgatggtagcagccattatgattttgaagaaaagataaattttgcagtccatccatcattacaagggggtcctcacaataatcacatcgctgctcttgccatagccttaaaacaagtggctacaccagagtacaaagcatatatgcaacaggtgaggaaaaatgctcaggcattagcgtctgctttgttgagaagaaaatgcagattggtgactggcggtactgataaccatttggtgctgtgggatctaacaacttggggcttagcaggcaagtgttatgagaaggtgtgtgaaatgtgccaaatcactctaaataaaagtgccatatttggtgacaatggtgctatctgtcctggaggagtgagaatcggtactcctgctatgacatcaagaggttgcttagaggctgatttcgagaaaattgctgactttcttcttaaggcctctcatataacgactgttgtgcagagggaacatggaaaaaaggattttctcaaaggtcttcataacaataaagaaattgttgagcttcgaaaccgggttgagatatttgcttctcagtttgccatgccaggatttgacgtttga

SEQ ID NO: 10028 - protein, 552 aa, Populus trichocarpa
MDLTQAAQSGLSLGFHSSPIPLQLLDQKQETRIDNEENQTEDEQFSILGHQMCIKRPRDNSSQSSASSSTTNSSKRVAMDPGLESRRAMVRAWGNHPLPIADPEIHEIMEKEKQRQFKGIELIASENFVCRAVMEALGSHLTNKYSEGLPGSRYYTGNQNIDQIELICWSRALAAFGLDSDKWGVNVQPYSCTSANFAVYTGLLLPGDRIMGLDSPSGGHLSHGYYTPGGKRVSASSIFFESLPYKVNPQTGYIDYDKMEEKAMDFRPKILICGGSSYPREWDYARFRQVADRIGAVLMCDMAHISGLVAAKECVSPFEYCDIVTSTTHKSLRGPRGGIIFYRKGPKLRKQGMLSHGDGSSHYDFEEKINFAVHPSLQGGPHNNHIAALAIALKQVATPEYKAYMQQVRKNAQALASALLRRKCRLVTGGTDNHLVLWDLTTWGLAGKCYEKVCEMCQITLNKSAIFGDNGAICPGGVRIGTPAMTSRGCLEADFEKIADFLLKASHITTVVQREHGKKDFLKGLHNNKEIVELRNRVEIFASQFAMPGFDV

SEQ ID NO: 10029 - DNA, 1590 bp, Populus trichocarpa
  CDS (1)..(1590)
atgcaagccaccagtggagccgcagtgatgggttctttgcaacagcctgttttgtcaaaagggccagcctttccaatgaaaaggagtgttatcattgggtttccgtatcaagttaagcttaattcagtgaagccatgcagggcttcttcccttgaaggaagcttggtcactggcagacccccctcttctgtttctgttcctatccctgaaactggagctgacataagtagcttcaaagattatggacttggtgaagctgatcctgaagtgcttgaaattataaataaggaaaaggataggcagttcaaaagccttgaacttattgcatcagagaatttcacatctcgagcagtgatggaagcagttggttcgtgcttaacaaataagtattctgaaggacttcctggtaaaagatactatggtggaaatgagtacattgatgagcttgaaaccctttgtcaaaaaagggctctggcatcatttaacttggatggaaagaagtggggtgttaatgttcaaccattgtctggatcccctgctaattttgaggtttatactgcacttcttaaaccacatgaccgaatcatgggtttggacttgcctcatgggggacacttgtctcatgggttcatgacccctaaaaggcgggtatctgggacatcaatttactttgagtctatgccatatcgacttgatgaatcaacaggcctggttgattatgatatgcttgagaaaacagctatcctctttcgaccaaaactcattattgctggtgctagtgcttatcctcgagattttgattatcctcgcatgaggaagattgcagatgctgtcggtgcttttctcatgatggatatggctcatataagtggtcttgttgctgcttctgttgttgccgacccctttgagtactgtgatgttgtgacaactacaacacacaagtcactacgaggtccaagaggtggaatgatctttttcaaaaaagatcctgttctaggagttgacatggaatctgccatcaacaatgctgtttttccaggcttacaaggcggtcctcataatcacacaattggtggattggcagtttgcttgaagcatgcacaatcccctgaatttaaagcttaccagaagcaggtcatctgtaactctagagcacttgcaaaccgaatggttgaattaggatataaattggtttctggtggcagcgacaatcatctcattcttgtagatctaaggccattgggacttgatggggctcgggtggagaaaatccttgacatggcttctatcaccctcaacaagaattctgtgcctggtgataagagcgccctagttcctggtggcattcgcattggatcccctgcgatgactaccagaggatttacagagacagaatttgtagctactgctgacttgattcatgaaggagtacaaataagtcttgaagctaaaaaatcagtatccggatccaagctccaggatttcttaaagtttgttaaatcccctgatttccctctaacagataaagtatcagatcttcaaagaagagttgaagcacttacaactcagtttccaatcccaggattatga

SEQ ID NO: 10030 - protein, 529 aa, Populus trichocarpa
MQATSGAAVMGSLQQPVLSKGPAFPMKRSVIIGFPYQVKLNSVKPCRASSLEGSLVTGRPPSSVSVPIPETGADISSFKDYGLGEADPEVLEIINKEKDRQFKSLELIASENFTSRAVMEAVGSCLTNKYSEGLPGKRYYGGNEYIDELETLCQKRALASFNLDGKKWGVNVQPLSGSPANFEVYTALLKPHDRIMGLDLPHGGHLSHGFMTPKRRVSGTSIYFESMPYRLDESTGLVDYDMLEKTAILFRPKLIIAGASAYPRDFDYPRMRKIADAVGAFLMMDMAHISGLVAASVVADPFEYCDVVTTTTHKSLRGPRGGMIFFKKDPVLGVDMESAINNAVFPGLQGGPHNHTIGGLAVCLKHAQSPEFKAYQKQVICNSRALANRMVELGYKLVSGGSDNHLILVDLRPLGLDGARVEKILDMASITLNKNSVPGDKSALVPGGIRIGSPAMTTRGFTETEFVATADLIHEGVQISLEAKKSVSGSKLQDFLKFVKSPDFPLTDKVSDLQRRVEALTTQFPIPGL

SEQ ID NO: 10031 - DNA, 1563 bp, Populus trichocarpa
  CDS (1)..(1563)
atggcagtggcaatgaccatggcccttcgccgtctctcctcttcctttgacaagccccttcgccctgctctcttcaaagccacctccctctattatatgtcttctttgccaaacgaagctgtatatgagaaggagaaacctggtgtcagctggccaaagcagctgaatgcacccttagaggctgttgatcctcaggttgctgatattattgagctcgagaaagctaggcaatggaaggggcttgagcttataccctcagagaacttcacttcggtatcagtgatgcaagctgtgggttctgtcatgaccaacaagtacagtgaaggataccctggtgcaagatactatggtggaaacgagtatattgacatggcagaatccttatgtcagaagcgtgctctggaagcatttcgcctggatcctgctaaatggggagtgaacgtgcaatctctatctggatctccagctaattttcaagtctacactgcattgttaaagcctcatgaaagaatcatggcacttgatcttcctcatggaggccatctttctcatggctatcagacagacaccaaaaaaatatctgcagtgtcaatattttttgagacaatgccatacagattgaatgagagcactggctatattgactatgatcagctggagaaaagtgccactcttttcagaccaaaattaatagtagctggtgctagtgcttacgcacgactatatgattatgcacgcattcgcaaggtttgcgacaaacaaaaagctatactgttggcagatatggcacacattagtggattggttgcagctgatgtcatcccgtcaccttttgagtatgcagatatagtgactaccacaactcacaagtcacttcgcgggccacgtggggcaatgattttcttcaggaaggggttaaaagaggttaacaaacaagggaaagaagtgttttatgactacgaggacaaaatcaatcaagctgtctttcctgggcttcaaggtggtccacacaaccacacaattgctggtttagcagttgctttgaaacaggctacaactgtagagtacaaagcgtatcaagagcaagttctaagtaattgtgcaaaatttgcccagagtttagttgagaaaggctacgaacttgtttctggaggaactgagaaccatttagttttggtgaatttgaagaacaagggtatagatggctccagagttgaaaaggtgcttgaatctgttcacattgctgcaaacaaaaacactgttcctggagatgtgtctgccatggttcctggtggcatcaggatgggaacgccggctcttacttctaggggtttcgttgaagaggattttgctaaggtggcagatttctttgatgccgctgtgaagttggcagtggagatcaaggctgaaaccaaagggacgaagttgaaggatttcttggctacgcagtctgctcctcactttcaatctgagatttcaaaactccgtcgtgacgtggaagagtacgctaagcaattcccaacaattggatttgaaaaggaaaccatgaagtacaagaattga

SEQ ID NO: 10032 - protein, 520 aa, Populus trichocarpa
MAVAMTMALRRLSSSFDKPLRPALFKATSLYYMSSLPNEAVYEKEKPGVSWPKQLNAPLEAVDPQVADIIELEKARQWKGLELIPSENFTSVSVMQAVGSVMTNKYSEGYPGARYYGGNEYIDMAESLCQKRALEAFRLDPAKWGVNVQSLSGSPANFQVYTALLKPHERIMALDLPHGGHLSHGYQTDTKKISAVSIFFETMPYRLNESTGYIDYDQLEKSATLFRPKLIVAGASAYARLYDYARIRKVCDKQKAILLADMAHISGLVAADVIPSPFEYADIVTTTTHKSLRGPRGAMIFFRKGLKEVNKQGKEVFYDYEDKINQAVFPGLQGGPHNHTIAGLAVALKQATTVEYKAYQEQVLSNCAKFAQSLVEKGYELVSGGTENHLVLVNLKNKGIDGSRVEKVLESVHIAANKNTVPGDVSAMVPGGIRMGTPALTSRGFVEEDFAKVADFFDAAVKLAVEIKAETKGTKLKDFLATQSAPHFQSEISKLRRDVEEYAKQFPTIGFEKETMKYKN

SEQ ID NO: 10033 - DNA, 1416 bp, Populus trichocarpa
  CDS (1)..(1416)
atggatccagtaactgtgtggggaaactcctccctccaaacagttgacccagaaatccacgacttaatcgagaaggaaaaacgccgccaatgcaaaggaatcgaactgatcgcatcagaaaacttcacttctttcgccgttatagaggctcttggaagcgctctcaccaacaagtactctgagggtatgccaggtaaccgctactacggcggtaatgaatatattgatgagattgaaaatctctgcagagctcgggcccttcaagcttttcatttagaccccactaaatggggtgtaaatgtccagccctattctggttcccctgcaaatttcgctgcgtacacagcagttctccagccccatgacagaatcatgggcttggatttgccttcaggggggcatttgactcatgggtattacacatctgggggtaaaaagatttcagctaccagtatttattttgagagtttgccttacaaggtgaacccgcaaactgggtttcttgattatgataggttggaagaaaaggctttggattttaggcctaagcttattatttgtggtggaagtgcttatcctagagactgggattataagaagtttagatctgttgctgataagtgtggtgctcttttgctttgtgacatggctcacatcagtggccttgttgctgctcaggaagctgccaacccgtttgagtactgtgacatagtcaccaccactacccacaaaagtttgaggggtcccagggctggtatgatcttctaccgcaagggccctaagccacccaagaagggtcagccggaggatgcagtttatgactttgaagacaagatcaactttgcagttttcccatctcttcagggtggtcctcacaaccaccagattggtgctctggctgttgcattgaaacaggcccagagccctgggttcaaggcctatgctaagcaagtcaaggccaatgcagttgcccttggaaactacttgatgagcaagggatacaagcttgttactgaaggcaccgagaaccaccttgttctgtgggatcttaggccccttgggttgacaggcaacaaggttgaaaaactatgtgaccttgcaaacatcactgtgaacaagaatgccgtgtttggtgacagcagtgctttggcacctggtggagtgagaatcggtgcccccgccatgacttctagaggtttggttgagaaggatttcgagcagattggagaattcctccaccgtgctgtgaccatcacactgagcatccaaaaggaacatggaaagctcttgaaggacttcaacaagggtctggtgaacaacaaggaaatcgaggccctcaaggctgatgttgaacagttctcaggctcctttgagatgcctggctttctgatgtctgagatgaagtataaggattag

SEQ ID NO: 10034 - protein, 471 aa, Populus trichocarpa
MDPVTVWGNSSLQTVDPEIHDLIEKEKRRQCKGIELIASENFTSFAVIEALGSALTNKYSEGMPGNRYYGGNEYIDEIENLCRARALQAFHLDPTKWGVNVQPYSGSPANFAAYTAVLQPHDRIMGLDLPSGGHLTHGYYTSGGKKISATSIYFESLPYKVNPQTGFLDYDRLEEKALDFRPKLIICGGSAYPRDWDYKKFRSVADKCGALLLCDMAHISGLVAAQEAANPFEYCDIVTTTTHKSLRGPRAGMIFYRKGPKPPKKGQPEDAVYDFEDKINFAVFPSLQGGPHNHQIGALAVALKQAQSPGFKAYAKQVKANAVALGNYLMSKGYKLVTEGTENHLVLWDLRPLGLTGNKVEKLCDLANITVNKNAVFGDSSALAPGGVRIGAPAMTSRGLVEKDFEQIGEFLHRAVTITLSIQKEHGKLLKDFNKGLVNNKEIEALKADVEQFSGSFEMPGFLMSEMKYKD

SEQ ID NO: 10035 - DNA, 1449 bp, Magnaporthe grisea 70-15
  CDS (1)..(1449)
atggccgaggctacttacgcattgtcggctactcataaggagatgcttgagaagtctcttctcgactccgaccctgaggtcgctgagatcatgaaacacgagatccagcgtcagcgcgagtccatcatccttatcgcctccgagaatgttacgtctcgggctgtcttcgatgcccttggttcgcctatgtcgaacaagtactccgagggctacccaggcaagcgctactacggtggcaaccagcacattgacgagattgagctcctctgccagcgccgtgctcttgctgccttcaacgtcactgaggacaagtggggtgtcaacgttcagtgcttgagtggcagccctgccaaccttcaggtttaccaggccattatgcctccccatggcaggctcatgggtctggacctccctcacggtggccacttgagccacggctaccagaccccccagcgaaagatttcggctgtttcgacctacttcgagaccatgccctaccgtgttgaccttgagactggcatcattgactacgaccagctcgagaagaacgtggtcctgtacaggcccaagattttggtggccggtacctctgcctactgccgcctgatcgattacgcgcggatgcgcaagatcgctgatctcgttggcgcttacttggtcgtcgacattgctcacatttctggcctcgtcgcttcgggtgtgatcccctccccgttcctccacgccgatgttgttactaccactacccacaagtctctccgtggtcctcgtggcgcgatgatcttcttccgcaggggtgttcgttccgtcgaccccaagactggcaaggagaccatgtacgacctcgaggagcccatcaacttctcggtcttccccggtcaccagggtggtccccacaaccacaccatcactgctctggctgtcgccctcaagcaggcatccacgcccgagttcaaggcctaccagcagcaggttgtcgacaacgccaaggcgttggagaacagcttcaaggagcttggccacaagctcgtctcggacggcaccgactcccacatggtcctggttgacctgcgtgcccactccctggatggtgctcgtgttgaggctgtacttgagcagatcaacatcgcctgcaacaagaacagcattcctggcgacaagagcgctcttaccccgtgcggtatccgtatcggtacccctgccatgaccagccgtggctttggtgtcgagcacttccagcgcgtcgccaaatacattgacgagagcatcaagatttgcaaggacgtccaggctgctctgcccaaggaggccaacaagctcaaggacttcaaggccaaggttgcttcgggcgaggtttccaggatcaacgagctcaagaaggagattgcgtcctggtgccaaaccttccctctccctgttgagggctggcgcaccgacgccggtatttaa

SEQ ID NO: 10036 - protein, 482 aa, Magnaporthe grisea 70-15
MAEATYALSATHKEMLEKSLLDSDPEVAEIMKHEIQRQRESIILIASENVTSRAVFDALGSPMSNKYSEGYPGKRYYGGNQHIDEIELLCQRRALAAFNVTEDKWGVNVQCLSGSPANLQVYQAIMPPHGRLMGLDLPHGGHLSHGYQTPQRKISAVSTYFETMPYRVDLETGIIDYDQLEKNVVLYRPKILVAGTSAYCRLIDYARMRKIADLVGAYLVVDIAHISGLVASGVIPSPFLHADVVTTTTHKSLRGPRGAMIFFRRGVRSVDPKTGKETMYDLEEPINFSVFPGHQGGPHNHTITALAVALKQASTPEFKAYQQQVVDNAKALENSFKELGHKLVSDGTDSHMVLVDLRAHSLDGARVEAVLEQINIACNKNSIPGDKSALTPCGIRIGTPAMTSRGFGVEHFQRVAKYIDESIKICKDVQAALPKEANKLKDFKAKVASGEVSRINELKKEIASWCQTFPLPVEGWRTDAGI

SEQ ID NO: 10037 - DNA, 1509 bp, Gibberella zeae PH-1
  CDS (1)..(1509)
atgatgaacatgaggcttcttcggcagcaatgccttcgcaccaagccatcactggctacgcgcatttccaccagaggtttcgcatctcaaaaagatctcctcggttcaagcctcgagcaaggcgaccctgagatccatgccattctcaagcgcgaagagaagcgtcagaaccacttcatcaacctcatcccctccgaaaacttcacctcgcgatcagttctcgatgccctaggcagtgtcatgcaaaacaagtactccgagggctacccaggagcacgatactacggcggcaatgaacacatcgatgaggccgaacgtctttgccaatccagagctctcgagactttccgtcttgaccccgagaagtggggtgtcaacgttcagccactctctggatccccagccaacctctacgcttactctgctatcctcaacacccacgatcgcatcatgggtcttgaccttccccatggaggccatctctcccacggctaccagatccccggcaagaagatctccatgatctcaaagtactacgagaccttcccctaccgactcaacgaggagactggcctgatcgactacgaaaagctgcgcgagaacgccctgctgtaccgccccaaggtcatcgtagcaggaacatctgcctattcccgccttatcgattatgagcgcatgcgcgccattgccaatgaggctggtgcttaccttctctctgatatggctcacgtttccggtcttgtcgctgctggtgttatcggaacaccctttgatgactctgacatcgtcacgaccaccacccacaagtccctgcgcggacctcgcggcgccatgatcttctaccgcaagggcgtgcgaagcacagacaagaagggcaagcagatcatgtacgacctcgagggccccatcaacgcgtccgtcttccccggccaccaaggcggtcctcacaaccacaccatcaccgccctcgctgtcgccctcaagcaggcccagacacctgagttcaaggactaccaagaaaaggtcctcgcaaactcccaagccatggccaaccagctcactgacctcggctactcgcttgtctctggcggcaccgacaaccacctcgttctcgtggacctcaagcccaagggtatcgacggcgcgcgtgtggagcgcgtgcttgaactcgttggcgtagcgagtaacaagaacaccgtgcctggtgaccgctcggcgctgaagccgggcggtctccgtctgggaacgcccgccatgacgacgcggggcttcaacggcgaggactttaagcgcgtggccgatattgttgaccgcggcgtgaagatcactctggcggttgataaggatgcgcgtgctgcggctgaggctaagggagctaagaacccaggtaccgtcaagaactttttggagtttttgggtgatggatccagtgtcaaggagattgctgcgctgcgcgatgaggttgctgagtgggttggaggattccctcagccttggctcaagtcatga

SEQ ID NO: 10038 - protein, 502 aa, Gibberella zeae PH-1
MMNMRLLRQQCLRTKPSLATRISTRGFASQKDLLGSSLEQGDPEIHAILKREEKRQNHFINLIPSENFTSRSVLDALGSVMQNKYSEGYPGARYYGGNEHIDEAERLCQSRALETFRLDPEKWGVNVQPLSGSPANLYAYSAILNTHDRIMGLDLPHGGHLSHGYQIPGKKISMISKYYETFPYRLNEETGLIDYEKLRENALLYRPKVIVAGTSAYSRLIDYERMRAIANEAGAYLLSDMAHVSGLVAAGVIGTPFDDSDIVTTTTHKSLRGPRGAMIFYRKGVRSTDKKGKQIMYDLEGPINASVFPGHQGGPHNHTITALAVALKQAQTPEFKDYQEKVLANSQAMANQLTDLGYSLVSGGTDNHLVLVDLKPKGIDGARVERVLELVGVASNKNTVPGDRSALKPGGLRLGTPAMTTRGFNGEDFKRVADIVDRGVKITLAVDKDARAAAEAKGAKNPGTVKNFLEFLGDGSSVKEIAALRDEVAEWVGGFPQPWLKS

SEQ ID NO: 10039 - DNA, 1395 bp, Apis mellifera
  CDS (1)..(1395)
atgcctgaattaatttataaaaatatctgggaaacagacccagagctttttgaattaatgaaaaaagaaaaaaaaagacaagaatctggtcttgaaatgattgctagtgaaaattttacatctcttagcgttcttcaatgtttaagttcttgccttcataataaatatagcgaaggtcttcctggtcaaagatattatggaggaaatgaatatattgatgaaattgaattattagcacaaaaacgtgctttagaagcatttaatttaaatcctgaagaatggggttgtaatgttcaaccatattcaggaagtccagctaattttgctgtttatacaggtataattgaacctcatggtcgtataatgggtttagatcttccagatggagggcatcttacacatggtttttttactccaaataaaaaagtttctgcaacatcattattttttgaatcaaaaccatacaaagttaatattaatactggtttaattgattatgataaattagctgaagaagcaagattatttaagcctaaaattataatagcaggagtatcttgttatagtagatgtttagattacaaacgattcaaagaaatagcagaagaaaataatgcttatctatttagtgatatggctcatgtagcaggattagttgctgctgaattaattcctagcccattcaaatatagtgatgttgtatctactacaacacataaaactttaagaggacctcgagcaggtgttatcttctttcgcaaaggaattagaaaaattggaaaagatggtcaaaaaattatgtatgatttagaagataaaattaatcaagctgtatttccaggactgcaaggtggacctcacaatcatgcaattgcaggcatagctacaacaatgaaacaagtcaaatcaccagaatttcttcaataccagaaacaaattatagctaatgcaaaaagattatgtacaaaattacaagagtatggttataaaattaatacagatggaactgatgttcatatgttacttgtagatttacgatctacaggtattactggagctaaagcagaaaaaattttggagagtatttctattgcttgcaataaaaatacagtgcctggtgataaaagtgcattgaattgtagtggtatcagacttggtacacctgcattaactactcgtggtttagttgaaaaagatattgataaagttgtaaactttatacacaaaggattattactttctaaagaagtatctaatatttctggtcctaaacttgttgactataaaagagtattaaatactgatgcttatataaaggcaaaagttgcagctttaagaaaagaagttgaaacattttctaaacaatttcctattcctggttttgaaatatattaa

SEQ ID NO: 10040 - protein, 464 aa, Apis mellifera
MPELIYKNIWETDPELFELMKKEKKRQESGLEMIASENFTSLSVLQCLSSCLHNKYSEGLPGQRYYGGNEYIDEIELLAQKRALEAFNLNPEEWGCNVQPYSGSPANFAVYTGIIEPHGRIMGLDLPDGGHLTHGFFTPNKKVSATSLFFESKPYKVNINTGLIDYDKLAEEARLFKPKIIIAGVSCYSRCLDYKRFKEIAEENNAYLFSDMAHVAGLVAAELIPSPFKYSDVVSTTTHKTLRGPRAGVIFFRKGIRKIGKDGQKIMYDLEDKINQAVFPGLQGGPHNHAIAGIATTMKQVKSPEFLQYQKQIIANAKRLCTKLQEYGYKINTDGTDVHMLLVDLRSTGITGAKAEKILESISIACNKNTVPGDKSALNCSGIRLGTPALTTRGLVEKDIDKVVNFIHKGLLLSKEVSNISGPKLVDYKRVLNTDAYIKAKVAALRKEVETFSKQFPIPGFEIY

SEQ ID NO: 10041 - DNA, 1458 bp, Candida glabrata CBS 138
  CDS (1)..(1458)
atgatgttgctacgtgccgctagagtgcccgtgttgggcagacgctttctttcccagcaacaattgatctcgaagcatgtgcaagaggtggaccccgagatgttccgcatcctcagcgatgagaggagcagacagaagcactctgtcacgctgatcccttctgagaacttcacgtcgaaggccgtcatggacctgctgggctctgagatgcagaacaagtactccgagggctaccccggcgagaggtactacggtggtaaccagttcatcgataaagctgagtcgctgtgccaggcccgtgccctggacctgtatggccttgaccctgagaagtggggggtcaatgtgcaggccctgagcggtgcccctgccaacctgtacgcttactccgcggtcatggaggtcggcgaccgtctgatgggtctcgacttgccccacggtgggcacttgtctcacggataccaattgccttccggaactaagatctcctacatctcaaagtacttcaacaccatgccataccacgtcaacaccgagaccggtatcattgactatgacactttggccatgacctctaagctgttcagaccaaaggtcatcgtcgcaggtacgtccgcatactcgaggaagctggactacgctaggttcagaaagatcgccgacggctgcggtgcctacttgctgagcgacatggcccacatctccggtctggtggccgccaatgtcatagactccccattcgagcactccgacatagtcaccaccaccacccacaaatccctaagaggcccccgtggtgctatgatattctacagaaagggtatcaagaaagtcaacaagaagactggcaaggagaccccattcactttcgacaagaccatcaacttctcagtgttcccaggccaccaaggtggcccacacaaccacaccatttctgcattggctgtggcattaaagcaagcaaagacccccgagttcgtcgagtaccagaagcaagtggtctccaacgcaaaggccttcggtgacgagctattgaagcgtggcttcgagctagtgtccggcggtaccgataatcacttgcttttgctaaacctgtccaacatgggcatcgacggtgctcgtttggaggctatcctggagaagattaacatcgccgcaaacaagaacaccatcccaggtgacaagtccgcgctgttcccatcaggtttgagagtaggtaccccagccatgactaccagaggcttccaagaacaagacttcaagaaggtcgctgagtacatcgacaacgccgttaaactatccattgctctgaagtcccaggagtccgcagacgctaaggacgtcagatcaaagctaaacagcttcaagcagttgtgtgaccagtctgaaccagtgcaaaaattagccgaagaagtgtcctcatgggtaggcacattcccagttcctggcgaattgtag

SEQ ID NO: 10042 - protein, 485 aa, Candida glabrata CBS 138
MMLLRAARVPVLGRRFLSQQQLISKHVQEVDPEMFRILSDERSRQKHSVTLIPSENFTSKAVMDLLGSEMQNKYSEGYPGERYYGGNQFIDKAESLCQARALDLYGLDPEKWGVNVQALSGAPANLYAYSAVMEVGDRLMGLDLPHGGHLSHGYQLPSGTKISYISKYFNTMPYHVNTETGIIDYDTLAMTSKLFRPKVIVAGTSAYSRKLDYARFRKIADGCGAYLLSDMAHISGLVAANVIDSPFEHSDIVTTTTHKSLRGPRGAMIFYRKGIKKVNKKTGKETPFTFDKTINFSVFPGHQGGPHNHTISALAVALKQAKTPEFVEYQKQVVSNAKAFGDELLKRGFELVSGGTDNHLLLLNLSNMGIDGARLEAILEKINIAANKNTIPGDKSALFPSGLRVGTPAMTTRGFQEQDFKKVAEYIDNAVKLSIALKSQESADAKDVRSKLNSFKQLCDQSEPVQKLAEEVSSWVGTFPVPGEL

SEQ ID NO: 10043 - DNA, 1497 bp, Kluyveromyces lactis NRRL Y-1140
  CDS (1)..(1497)
atgctttcaagatctgctcgttgttctagggctgttctcttcagtgccaaacgctctctagcttcccaggctaatactggtgctaatgccagtgctaaccaggttatggtatcaaagcatgtgcaagacattgacccagaaatgtatgacatcttgacgaaagaacgcaaaagacaaaaacattccatcactttgattccaagtgaaaacttcacttctaagtctgttatggatcttttgggttccgaaatgcaaaacaagtattctgagggctatccaggtgagcgttactatggtggtaatcaatttattgatatggcagaatctctgtgccaaaagcgtgccttggaattgtacaatttggatcctcaactatggggagttaacgttcagccattgtccggtgctccagctaacttatacgcttattctgcagttatggaaacaaacgaccgtttgatgggtttggatttacctcatggtggtcatttgtctcacggctaccaattgccaagtggtactaagatttcatatatctccaagtattttcaaacaatgccataccatgtcgactcacaaactggcataatcgattatgatttcttgtccaagacgtctaaattatttagacctaaggttatcgttgcaggtgcttctgcatactccagagtcttggattacaagcgtttcaaggagattgctgatgcatgcggggcctacttgatgtctgatatggcccatatctcgggacttgtcgccgctggtgttactcgttctccattcgaatattctgatattgttacaactactacccacaaatctttacgtgggccaagaggtgctatgatcttttacagaaagggtgttagaaaggttacaaagaaaggtaaggaagtcctatacgacttggataagagaatcaacttttccgtgttcccaggtcatcaaggtggtccacataatcatactatttctgccttagccgttgctttgaaacaagctgccactccagaattcaaagagtaccaagccgctgttgttgaaaatgctcgtattttcggcgaagaattagtcaagaagggcttcgaattagtttctggcggtaccgatactcatttgatcttgatcaatttatctaacttgggcattgatggtgccaggttggaaaccctgttggaaaacatcaacattgctgctaataaaaatactattccaggtgataaatcggctttgttcccgtcaggtttgagagttggtacaccagctatgaccactagaggctttgggccacaagaatttgcccaagtcgctgcttatattgacagagctgttaagttagccattggcatcaaatctcaagaatctccagatgctaaagacgctagatcgaagttagccagcttcaaagaactatgcaaggaatcagaccaagtcaagcaactagctgacgaagtctatcaatgggttggtgagttcccagttccaggtgaattataa

SEQ ID NO: 10044 - protein, 498 aa, Kluyveromyces lactis NRRL Y-1140
MLSRSARCSRAVLFSAKRSLASQANTGANASANQVMVSKHVQDIDPEMYDILTKERKRQKHSITLIPSENFTSKSVMDLLGSEMQNKYSEGYPGERYYGGNQFIDMAESLCQKRALELYNLDPQLWGVNVQPLSGAPANLYAYSAVMETNDRLMGLDLPHGGHLSHGYQLPSGTKISYISKYFQTMPYHVDSQTGIIDYDFLSKTSKLFRPKVIVAGASAYSRVLDYKRFKEIADACGAYLMSDMAHISGLVAAGVTRSPFEYSDIVTTTTHKSLRGPRGAMIFYRKGVRKVTKKGKEVLYDLDKRINFSVFPGHQGGPHNHTISALAVALKQAATPEFKEYQAAVVENARIFGEELVKKGFELVSGGTDTHLILINLSNLGIDGARLETLLENINIAANKNTIPGDKSALFPSGLRVGTPAMTTRGFGPQEFAQVAAYIDRAVKLAIGIKSQESPDAKDARSKLASFKELCKESDQVKQLADEVYQWVGEFPVPGEL

SEQ ID NO: 10045 - DNA, 1482 bp, Debaryomyces hansenii CBS767
  CDS (1)..(1482): transl_table=12
atgattccaacaaccttacgtacattgagaacctcgtctaagagattgcctggttccttttccagatgctatgcattgtctgctaatgcacaatcattgatctcaaaagctgtgaaggacgtcgacccagagatggccgaaattttacaacaagaaagaaacagacaaaaaagctcgattactttgattccatcggaaaatttcacttccaaggctgttatggacttgttaggatcggagatgcaaaacaagtactccgaaggttaccctggtgaaagatactacggtggtaatgaaatcatagataaagctgagtcattatgtcaaaagagagcattagaagcatttgacttgaacccggaagaatggggtgtcaacgtgcagccattatccggtgctccagctaacttgtacgcttactctgctgttttggaagtaggtgacagaatcatgggtttggacttacctcacggaggacatttatcccacggttaccaaactccaacaaccaaaatttcatacatctcgaagtatttccaaaccatgccatatagattaaacgaagaaaccggtttaattgactatgacaccttagaggccaatgccatgttattcagaccaaaggttattgttgctggtacttctgcatactctagaatcattgactataagagaatgaggcaaattgccgacaaggttggtgcctacttattgagtgatatggcccacatttccggtttggtttctgctggtgtcaccgattcaccattcccattctccgatattgttaccaccaccactcacaagtccttgagaggtccaagaggtgccatgattttctacagaaagggtgttagaaaggtcaccaagaagggtaaggaaattctctacgacttagacaagaagattaacttctctgttttcccagctcaccaaggtggtccacacaatcataccatctctgctttagccgttgctttgaagcaaacttcttacccagaattcaaggaataccaaaaggatgtcgttgccaatgcagccagcttcgccagcgaattgcaatccaagggtttcactttagtttccggtggtactgacacccacttaatcttagtcgacttgagatctaagaacattgacggtgccagagttgaagccgtattagaaagagctaacattgctgccaacaagaacactgttccaggtgacaagtccgctttattcccatccggtttaagagttggtaccccagctatgaccactagaggctttggtgcctctgaattcgcaagagttgctgaattctttgaaagggctgttcagatttcaattgacttgaaggctcaagaacaaggaagctcttcaaaggaattgttggcctctttcaagcaattggctaacagtagtagtgctgttcaagaattagccaccgaagtcaaggattgggtttctacttatcctgttccaggtgatcttccataa

SEQ ID NO: 10046 - protein, 493 aa, Debaryomyces hansenii CBS767
MIPTTLRTLRTSSKRLPGSFSRCYALSANAQSLISKAVKDVDPEMAEILQQERNRQKSSITLIPSENFTSKAVMDLLGSEMQNKYSEGYPGERYYGGNEIIDKAESLCQKRALEAFDLNPEEWGVNVQPLSGAPANLYAYSAVLEVGDRIMGLDLPHGGHLSHGYQTPTTKISYISKYFQTMPYRLNEETGLIDYDTLEANAMLFRPKVIVAGTSAYSRIIDYKRMRQIADKVGAYLLSDMAHISGLVSAGVTDSPFPFSDIVTTTTHKSLRGPRGAMIFYRKGVRKVTKKGKEILYDLDKKINFSVFPAHQGGPHNHTISALAVALKQTSYPEFKEYQKDVVANAASFASELQSKGFTLVSGGTDTHLILVDLRSKNIDGARVEAVLERANIAANKNTVPGDKSALFPSGLRVGTPAMTTRGFGASEFARVAEFFERAVQISIDLKAQEQGSSSKELLASFKQLANSSSAVQELATEVKDWVSTYPVPGDLP

SEQ ID NO: 10047 - DNA, 1446 bp, Yarrowia lipolytica CLIB122
  CDS (1)..(1446)
atgcagcgattcactcgactttcccggcctctcaaccgaggcctgcttcgagcctacgccaccaaggcgtcgcccgatacccagatgactcagcagaccttgtacgcgtccgatcccgagatcgcagacatcatcaagaaggaaaccgaccggcagatcggctccatcaccctgatcccgtcggaaaacttcacctcgcaggccgtcatgaacgccctgggctccgtcatgcagaacaagtactctgagggctaccctggcgcccgatactacggtggtaacgagttcattgatcaggccgagtctctgtgccagaagcgagccctggaggcgttcaacctggaccccaaggtctggggagtcaacgtccagcccctgtctggtgcccccgcaaacctctacgcttactccgctgtcatggaggccggtgaccgactgatgggcctggacctgccccatggaggccatctctcccacggctaccagatcccctccaagaagatctcctacatctccaagtacttcaacaccatgccctaccgactggacgagtcaaccggtctcattgactatgacacgctcgccaagaacattcttcttttccgacccaaggtgctggttgctggagcttccgcctactctcgtctgatcgactacaagcgaatgcgagagatcgccgactctgtgggcgccattctcatgtctgacatggcccacatttccggtatggttgccgctggcgtcatcccctcgccttttgagtactcggacattgtgaccaccaccacccacaagtctcttcgaggcccccgaggtgccatgatcttctaccgaaaggacggtgaccgaaacctcgaggagaagatcaacttctccgtcttccccggccaccagggaggtccccataaccacaccatcaccgctctggccgttgcgcttggccaggccaagtctcccgagttcaaggagtaccagcagaaggttgtcgacaacgcccaggccttctccaaggctctgtctgacgccggcttcaagcttgtttctgacggaaccgacacccatctgatcctcattgatctgaaacccttttccattgacggtgctcgaaccgagatggttcttgacggtatgaacattgccgctaacaagaacaccgtgcccggcgacaagtctgctcttgtgcccggtggtatccgaatcggtactcccgccatgaccaccagaggttttgatcagtctgagttcgagcaggttgccaagtacattgtcaaggccgtcgatattgccaagcgactcaagcagaaggctgtttccgagggcgtcaagaagatctcccagttccggccctacgtcgatgctgatgccgaggtcaaggagctccgaaacgaggtcgagtcctgggccaagaagtaccctttccctattgatcctgctggatacaaatag

SEQ ID NO: 10048 - protein, 481 aa, Yarrowia lipolytica CLIB122
MQRFTRLSRPLNRGLLRAYATKASPDTQMTQQTLYASDPEIADIIKKETDRQIGSITLIPSENFTSQAVMNALGSVMQNKYSEGYPGARYYGGNEFIDQAESLCQKRALEAFNLDPKVWGVNVQPLSGAPANLYAYSAVMEAGDRLMGLDLPHGGHLSHGYQIPSKKISYISKYFNTMPYRLDESTGLIDYDTLAKNILLFRPKVLVAGASAYSRLIDYKRMREIADSVGAILMSDMAHISGMVAAGVIPSPFEYSDIVTTTTHKSLRGPRGAMIFYRKDGDRNLEEKINFSVFPGHQGGPHNHTITALAVALGQAKSPEFKEYQQKVVDNAQAFSKALSDAGFKLVSDGTDTHLILIDLKPFSIDGARTEMVLDGMNIAANKNTVPGDKSALVPGGIRIGTPAMTTRGFDQSEFEQVAKYIVKAVDIAKRLKQKAVSEGVKKISQFRPYVDADAEVKELRNEVESWAKKYPFPIDPAGYK

SEQ ID NO: 10049 - DNA, 1500 bp, Cryptococcus neoformans var. neoformans JEC21
  CDS (1)..(1500)
atgcccaggcctattctcgccgctcttcgaactaccatccgcccagctttctcaaaacaattcagaatggcctcctccatccctgttcccaccgactttaacgcttgtctctacaagcccttggctgaggccgaccccgagatcaactctctcatcgagaaggagacatggcgtcagttctctggtctcgagcttatcgcttccgagaacttgacctctctcgcggttatggaggccaatggctctatgcttaccaacaagtactctgagggtcttcccggtgctcgatactacggtggtaacgagttcatcgacgttgtcgagaaccttaccagggagcgtgctttgaaggctttcaaccttgaccccaagatctggggcgtcaacgtccagccttactctggttccaccgccaactttgccgctttcactgctctcatcaacccccaggaccgagtgatgggtctcggtcttcccgacggtggtcacctcacccacggttactacaccgccaagaagaagattaccgcttcttccatctacttccagtctttcccttaccgagttgaccccaagactggcatcattgactacccccagctcgagaccaacgccaacctctacaagccccgtcttgtcgtttgcggtggttccgcttacccccgtgactgggactatggccgtctccgaaagatcgccgatagccagggcgcctacctcttgtctgacatggcccacatctctggtctcgtcgctgctgctgagcaaaactctcctttcgagtactgtgacgtcgtgaccaccactacccacaagaccctccgtggtccccgagctggtctcatcttcttccgaaaggacaaggaatccgacctcgaggctcgtgtcaacgctgccgtcttccctgcctgtcagggtggtccccacaacaacaccatcgctggtgttgccgtcgccctcaagcaggctgccgaccccgctttcaaggagtacgccaagcaggtcagggccaacgccgctgccatggctgccgtcttgttcaagcacggttacaggctccaaactgacggtactgagaaccacttgatcctctgggacctcaggcctatcggtttgaccggctccaaggttgagaagatttgtgatgccgctcacatcaccctcaacaagaatgccgtcgccggtgatacttctgccctcgtgcccggtggtgtccgaatcggtacctctgccttgacttcccgatcgatgaaggagcaggatgtggagaaggttgccgagttcctccaccgtgtggtccagattgcgctcaagactcaggaggaggcgggttccaagcttctcaaggactttgtcaagacttacgagtctggtaacggcgaagcccccaagcttatcgctgagctcaaggaggacgttatgaagtttgccaccagcttccccttgcctggtgtccccgacacttccaagattgtccgacccgagggcgtcaacctctaa

SEQ ID NO: 10050 - protein, 499 aa, Cryptococcus neoformans var. neoformans JEC21
MPRPILAALRTTIRPAFSKQFRMASSIPVPTDFNACLYKPLAEADPEINSLIEKETWRQFSGLELIASENLTSLAVMEANGSMLTNKYSEGLPGARYYGGNEFIDVVENLTRERALKAFNLDPKIWGVNVQPYSGSTANFAAFTALINPQDRVMGLGLPDGGHLTHGYYTAKKKITASSIYFQSFPYRVDPKTGIIDYPQLETNANLYKPRLVVCGGSAYPRDWDYGRLRKIADSQGAYLLSDMAHISGLVAAAEQNSPFEYCDVVTTTTHKTLRGPRAGLIFFRKDKESDLEARVNAAVFPACQGGPHNNTIAGVAVALKQAADPAFKEYAKQVRANAAAMAAVLFKHGYRLQTDGTENHLILWDLRPIGLTGSKVEKICDAAHITLNKNAVAGDTSALVPGGVRIGTSALTSRSMKEQDVEKVAEFLHRVVQIALKTQEEAGSKLLKDFVKTYESGNGEAPKLIAELKEDVMKFATSFPLPGVPDTSKIVRPEGVNL

SEQ ID NO: 10051 - DNA, 1377 bp, Aspergillus nidulans FGSC A4
  CDS (1)..(1377)
atggaggaccgcctcgtcgacactgaccccgaggtcgctaagatcatggagaatgagatccaacgtcagcgtgaatctgttgtcttgattgcttcggagaacttcacttcccgcgctgtcttcgatgctcttggttctcccatgtgcaacaagtattccgagggttaccccggtgctcgttactatggtggaaaccagcacattgacgctatcgagctgctctgccagtcccgtgcccttaaggcattcaacctcgacgccgataagtggggtgtcaacgttcagtgccttagtggcagcccggccaatttgcaggtctaccaggctctcatgcgcccccatgaccgtctcatgggtctcgaccttccccacggtggtcacctgagccacggttatcagactccttccaggaagatctctgctgtgtctacttacttcgagaccttcccttaccgcgttaacctcgagaccggtattattgactacgacacccttgaagccaacgctgagctgtaccgccccaagattttggttgccggtacctctgcctactgccgtctgatcgactatgcccgcatgcgcaagatcgctgacaaggttggcgcctaccttgttgttgacatggcccacatctccggtctgattgctgctggtgtcatcccctctcctttcgagtacgccgatgtagtcaccactaccactcacaagtctctccgcggtccccgtggtgccatgattttcttccgcaagggcgtccgcagcactgaccccaagactggtaaggacatcatgtatgacctcgagggtcccatcaacttctccgtcttccctggtcaccagggtggtccccacaaccacaccatcactgctctctctgtcgccctcaagtacgccgctaccaccgagttcaagcagtaccaggagcaggtgatcaagaacgccaaggcccttgagaacgaattcaaggccattggccacaagctcgtctccgacggtaccgacagccacatggtactcgtggatctccgccccaagtctctcgacggtgcccgtgtcgaagccgtcctcgagcagatcaacattgcttgcaacaagaactccatccctggtgacaagtctgctctcactccctgcggtatccgcattggtgctcccgccatgaccagccgtggtatgggcgaggaggacttcaagcgcatcgctcgctacattgaccaggccatcaacatctgcaagtccgtgcaggccgcacttcccacggatgccaacaagctcaaggacttcaaggccaaggttgcttccggcaccgtccctgagatcaacgacctgcgcaaggagatcgctgcgtgggccagcaccttccctctccctgtctaa

SEQ ID NO: 10052 - protein, 458 aa, Aspergillus nidulans FGSC A4
MEDRLVDTDPEVAKIMENEIQRQRESVVLIASENFTSRAVFDALGSPMCNKYSEGYPGARYYGGNQHIDAIELLCQSRALKAFNLDADKWGVNVQCLSGSPANLQVYQALMRPHDRLMGLDLPHGGHLSHGYQTPSRKISAVSTYFETFPYRVNLETGIIDYDTLEANAELYRPKILVAGTSAYCRLIDYARMRKIADKVGAYLVVDMAHISGLIAAGVIPSPFEYADVVTTTTHKSLRGPRGAMIFFRKGVRSTDPKTGKDIMYDLEGPINFSVFPGHQGGPHNHTITALSVALKYAATTEFKQYQEQVIKNAKALENEFKAIGHKLVSDGTDSHMVLVDLRPKSLDGARVEAVLEQINIACNKNSIPGDKSALTPCGIRIGAPAMTSRGMGEEDFKRIARYIDQAINICKSVQAALPTDANKLKDFKAKVASGTVPEINDLRKEIAAWASTFPLPV

SEQ ID NO: 10053 - DNA, 1482 bp, Candida albicans SC5314
  CDS (1)..(1482): transl_table=12
atgctttcatctacgttacgtcgttctgtgagagctcaatccaagaatttgccagcttttgcaagaagaacctatgccgtttctccatctgctcaagcattaatttctaaatccgttcaagatgttgaccctgagatggcggatattttgaatcaagaaagaaccagacaaaagaactcaattactttgattccatcagagaattttacctctaaagcagttatggatttgttgggttcagaaatgcaaaacaaatattctgaagggtaccctggagaaagatattatgggggtaatgaaataatcgataaagctgaagcattatgtcaaaaaagagctttagaagcatttggattggacccatctcaatggggggttaatgtacagccattatctggtgctccagccaatttgtatgcttatagtgcaattttagaagttggtgacagaattatgggtttagatttacctcatggtggtcatttgtctcatggatatcaaaccaacactaccaagatttcctacatttccaaatacttccaaaccatgccatatagattaaatgaagaaactggtataattgattacgatactttagaaaaaaatgctcaattgtttagacctaaagtaattgttgctggtgcttcagcttattctcgtgtcattgactacaaaagaatgagacaaattgctgataaggttggagcttatttattgtccgatatggcccacatctctgggttagtttctgctggtgttactgattcaccattcccatattctgatattgtcaccactactacccataaatcgttgagaggaccaagaggagccatgattttctttagaaaaggaatcagaaaggttaccaaaaagggtaaagaaattccttatgaattggaaagaaagatcaatttctcggttttcccagggcatcaaggtggtccacataatcatactatttctgctttagcagttgctttaaaacaatgtactgaaccagaatatgttaaataccaacaagaagttgtttctaatgccaaacattttgctgatgcattagtctccaagggtttcaaattggtttccgatggtactgatactcatttgatcttggttgatttaagatcaagaaatattgatggtgctagagtcgaagctgttttggaaagagctaacatagctaccaataagaacaccgttcctggtgatgtatcagctcttttcccatcaggtttaagagttggtactccagctatgaccactagaggatttgggccagaagagtttgataaagttgctgaattcattgatcaagccgttaacattgccattgaattaaaagctcaagaacaaggtaaagtaccaaaagaattattggcatcatttaaaaaattggctgatgaaagtgataaagttaaacaattagataaagaagttgtcagttgggtcagtaaatatcctgtcccaggtgaattgtaa

SEQ ID NO: 10054 - protein, 493 aa, Candida albicans SC5314
MLSSTLRRSVRAQSKNLPAFARRTYAVSPSAQALISKSVQDVDPEMADILNQERTRQKNSITLIPSENFTSKAVMDLLGSEMQNKYSEGYPGERYYGGNEIIDKAEALCQKRALEAFGLDPSQWGVNVQPLSGAPANLYAYSAILEVGDRIMGLDLPHGGHLSHGYQTNTTKISYISKYFQTMPYRLNEETGIIDYDTLEKNAQLFRPKVIVAGASAYSRVIDYKRMRQIADKVGAYLLSDMAHISGLVSAGVTDSPFPYSDIVTTTTHKSLRGPRGAMIFFRKGIRKVTKKGKEIPYELERKINFSVFPGHQGGPHNHTISALAVALKQCTEPEYVKYQQEVVSNAKHFADALVSKGFKLVSDGTDTHLILVDLRSRNIDGARVEAVLERANIATNKNTVPGDVSALFPSGLRVGTPAMTTRGFGPEEFDKVAEFIDQAVNIAIELKAQEQGKVPKELLASFKKLADESDKVKQLDKEVVSWVSKYPVPGEL

SEQ ID NO: 10055 - DNA, 1614 bp, Aspergillus fumigatus Af293
  CDS (1)..(1614)
atgtctctgagtcgttgcggacgacaggccttgcgcctcatcccgcggtctggaagctcttctagagctaccactgttatcaccaccgcccgccatccgggcttccagcttcagactcccactgctgcatccaggaatgtgcaatggcggagcgtatcgtcgtccagccgcgatggccagcaacatttgctctccgcatccctcgaggagcaagatcccactgtctacaacattctgcaaaaggagaaaaaacgccaaaagcatttcatcaacctcatcccctccgagaactttacgtcacaagccgttctcgatgcgctgggaagtgtgatgcaaaacaaatattccgaagggtatcccggtgcgagatactatggagggaacgagttcatcgacgagtccgagagactgtgccagcagcgtgccctcgagacgtttcgactcgaccccgaggaatggggtgtcaacgtacaggctctctccggttctcccgctaacctgtatgccatctccgccgtcctcaacacacatgaccgtctgatgggcctggatctgccccatggtggccacctgtcacacggttaccaaacgcccaccaagaagatctctttcatctccaagtacttcgagaccctgccttaccgcttggatgaatccaccggcctcattgactacgatggagcggagaagctggctctgctctaccgacccaagctgatcatcgctgggacttcggcctacagccggcttatcgattacccccgcatgcgccagatcgctgatgctgctggtgcgtacttgttgagcgatatggcccacatttcgggcttagtagccgccggtgtgctgccgtcgcccttcccccactccgacattgtgacaaccacaacccacaagtctttgcgcggtcctcgcggtgccatgatcttctaccgcaagggcgtccgccggacagacaagaagggcaacaaggagatgtacgacctcgagaatctcatcaacgcgtcggttttccctggtcaccagggtggtcctcacaaccacaccatcaccgcgctgtccgtcgccttgaagcaggcccaaacgcctgaattcaaggcctaccaggagaccgttttggccaatgccaaggcgctgtcggaacggctgggtggcccaatcaacaatggcggtctcggctacaacatcgtgtcgggcggcaccgacaaccacctggtccttgtcgacctgaagaatcgcggcgtcgatggtgcccgtgtcgagcgtgtccttgaactctgtggtgtcgccagcaacaagaacactgtccctggcgaccagtccgccctgaagcccggcggcctgcgtctgggaactcccgccatgaccactcgtggcttccagcctgaggacttccgtcgtgtcgctgacattgtcgaccgggccgtgatcatcacccagaaactggacaaggcggccaaggagagtgctgccgccaagggagtcaagaaccccaacactgtcaaggccttcctcgactacgtgggcgagggtgacgagatctccgagattgtgctgctgagaaaggaggtggaagactgggtgggcactttcagccttccgtgggatgattaa

SEQ ID NO: 10056 - protein, 537 aa, Aspergillus fumigatus Af293
MSLSRCGRQALRLIPRSGSSSRATTVITTARHPGFQLQTPTAASRNVQWRSVSSSSRDGQQHLLSASLEEQDPTVYNILQKEKKRQKHFINLIPSENFTSQAVLDALGSVMQNKYSEGYPGARYYGGNEFIDESERLCQQRALETFRLDPEEWGVNVQALSGSPANLYAISAVLNTHDRLMGLDLPHGGHLSHGYQTPTKKISFISKYFETLPYRLDESTGLIDYDGAEKLALLYRPKLIIAGTSAYSRLIDYPRMRQIADAAGAYLLSDMAHISGLVAAGVLPSPFPHSDIVTTTTHKSLRGPRGAMIFYRKGVRRTDKKGNKEMYDLENLINASVFPGHQGGPHNHTITALSVALKQAQTPEFKAYQETVLANAKALSERLGGPINNGGLGYNIVSGGTDNHLVLVDLKNRGVDGARVERVLELCGVASNKNTVPGDQSALKPGGLRLGTPAMTTRGFQPEDFRRVADIVDRAVIITQKLDKAAKESAAAKGVKNPNTVKAFLDYVGEGDEISEIVLLRKEVEDWVGTFSLPWDD

SEQ ID NO: 10057 - DNA, 1533 bp, Ustilago maydis 521
  CDS (1)..(1533)
atggcttcccgtcgttcttacgcaacactcgttcaaagcttcctgaagcactcttccctccctgtcgtccgaggtcctgcttctcctgcctccatccttcctcgcacctttgccacctctgttctcaagatgtccattgccgtccccaccgatttcaacaaggttctctaccagcctctggccgaggctgaccccgaggtccagcagattatcgagaatgagacttaccgtcaattctccggtctcgagctcatcgcttccgagaatctgacctcactcgccaccatggaagctaacggctccatccttactaacaagtattctgagggtcttcccggtgcccgatactacggcggtaacgagtacatcgaccagctagaggttctctgccagcagcgtgccttgaaggccttcaacctcgaccccaaggtctggggcgtcaacgttcagccttactctggctccaccgccaactttgctaccttcaccgccctcctccagccccaggaccgtatcatgggtctcggccttccttccggtggccacttgacccatggttactacaccgccaagaagaagatctcggcttcttcgatctacttccagtcgttcccttacaacgttgaccccgccaccggctacatcaactacgacgagctcaagaagaacgctgatcttttcaagccccgcatggtcatctgcggtggttccgcctacccccgtgactgggactacgccaagcttgccgagattgccaagactcagtccgcttacctcatggccgacattgcccacatctctggtctcgttgccgcccaggtgcagaacaaccccttcgagtactgtgacattgtcaccaccactactcacaagaccctccgcggtccccgtgctggtatgatcttcttccgcaaggatcgtgatgccgagattgagggtcgtgtcaatgcggccgtcttccctgcctgccagggcggcccccacaacaacaccattgccggtatcgctgttgcgctcaagcaggtcgccgaccccgctttcaagcagtacgccacccaagtcatcaagaactcgcaggccattgccaaggtcctctctggcaagggctacaagctccagactgacggctcggagaaccacctgattctttgggacttgcgtcctcttggcctcaccggctccaaggtcgagaacatttgcgaccttgcgcacatcacgctcaacaagaacgccgtcagcggtgacacttcggcccttgtgcccggtggtgttcgtatcggcactggtgcccttacctcgcgatccatgggcgagaaggacatggagaaggtggctgagttccttgaccgcgtcgtccagatctcgcttgagattcaaaagacgtcgggcaagaaactcgttgacttcatgaacgctgcccgccagtcggaggccgtcaagcagctcaacaaggacgtcgaggcctttgccaccagcttcccccttcctggtgttcccgacacctcgatcatcaagaagcccgccgctcactaa

SEQ ID NO: 10058 - protein, 510 aa, Ustilago maydis 521
MASRRSYATLVQSFLKHSSLPVVRGPASPASILPRTFATSVLKMSIAVPTDFNKVLYQPLAEADPEVQQIIENETYRQFSGLELIASENLTSLATMEANGSILTNKYSEGLPGARYYGGNEYIDQLEVLCQQRALKAFNLDPKVWGVNVQPYSGSTANFATFTALLQPQDRIMGLGLPSGGHLTHGYYTAKKKISASSIYFQSFPYNVDPATGYINYDELKKNADLFKPRMVICGGSAYPRDWDYAKLAEIAKTQSAYLMADIAHISGLVAAQVQNNPFEYCDIVTTTTHKTLRGPRAGMIFFRKDRDAEIEGRVNAAVFPACQGGPHNNTIAGIAVALKQVADPAFKQYATQVIKNSQAIAKVLSGKGYKLQTDGSENHLILWDLRPLGLTGSKVENICDLAHITLNKNAVSGDTSALVPGGVRIGTGALTSRSMGEKDMEKVAEFLDRVVQISLEIQKTSGKKLVDFMNAARQSEAVKQLNKDVEAFATSFPLPGVPDTSIIKKPAAH

SEQ ID NO: 10059 - DNA, 1557 bp, Strongylocentrotus purpuratus
  CDS (1)..(1557)
atggctactgttaacggaaccaagacagtgatcaagacagcgatgaatggtgatgggagtctaaagacagtcaccaatggcaatggtgatgggagtctcaagaaagttagcaatggcaatggcgatgggagtctcaagacagtcactaatagtgatgggagtccttggtttggacaccagtcgttggaagagaatgacccggagatgtatgctatcatcttaaaggagaaggatcgtcaaaggaaaggcttagaactgattgcatcagagaacttcccaagcagggctgttctagaggctctcggctcctgtctgcaaaataaatactgcgagggataccctggaaatagatactatggcggtacgcagttctttgatgaaatggaacttctgactcagaagagagccttagcagcatttggtttgaaggaggaggaatggggcgtcaatgtccagccgtattcaggctctccagcaaactttgccgtctacactggagtgattggcccccatggtcgtatcatgggtctggatctaccggacggtggtcaccttacacatggattcatgacggctaagaagaagatctctgcaacgtccttgttctttgagtcaatgccttacagggtgaatcctaaaacaggcctcattgattatgaagctctagctgtaaacgccagattgttccgtccacaaatgatcattgcaggtatgagctgttatcctaggaatctagactacaaacgtttcaaggagatagcagtagagaatgatgcttatcttctagctgatatggctcacgtgagtggattagttgctgctggagttgtagctaatccttttgagtactgtgacatcgttacaagcacaacacacaagacacttagaggacctcgatcaggcatcatcttcttccgtagaggtgtccgtaaggttctcaagaatggcactgaggtgatgtatgaccttgagaaaccgatcaacgaagccgtcttccctggtcttcaaggtggaccccatatgcatgctgtaggaggcgttggtgtagccttattgcaggcttcacaaccggagtttaagctgtatgcccgggatgtcgtcacaaacgcacaagccatggctgaagaacttatgaagagaggttatactatttcttcaggtggaacggacactcatcttctactccttgacctccgacccctgggactggatggagctcgtggagagttcgtgcttgagcgtgtaggaatcgttctcaataagaacacatgtcctggggacaagagcgcactcaagcctggcggtctaaggatcggtacaccagctctcacgtcaagaaacttcaaggttactgatttcatgatggtggttgactacattgatagaggtctgaagttgactgcagaggcaaacaagaagtgttcaagtacaacccttcgtgacttcaaggcttacgtcacaagtgattcagacttccaatccaaacttgctgcccttgaaaaggaggtcgaatcttttgctgtaaggttcccattacctggtcatgaagttctgtaa

SEQ ID NO: 10060 - protein, 518 aa, Strongylocentrotus purpuratus
MATVNGTKTVIKTAMNGDGSLKTVTNGNGDGSLKKVSNGNGDGSLKTVTNSDGSPWFGHQSLEENDPEMYAIILKEKDRQRKGLELIASENFPSRAVLEALGSCLQNKYCEGYPGNRYYGGTQFFDEMELLTQKRALAAFGLKEEEWGVNVQPYSGSPANFAVYTGVIGPHGRIMGLDLPDGGHLTHGFMTAKKKISATSLFFESMPYRVNPKTGLIDYEALAVNARLFRPQMIIAGMSCYPRNLDYKRFKEIAVENDAYLLADMAHVSGLVAAGVVANPFEYCDIVTSTTHKTLRGPRSGIIFFRRGVRKVLKNGTEVMYDLEKPINEAVFPGLQGGPHMHAVGGVGVALLQASQPEFKLYARDVVTNAQAMAEELMKRGYTISSGGTDTHLLLLDLRPLGLDGARGEFVLERVGIVLNKNTCPGDKSALKPGGLRIGTPALTSRNFKVTDFMMVVDYIDRGLKLTAEANKKCSSTTLRDFKAYVTSDSDFQSKLAALEKEVESFAVRFPLPGHEVL

SEQ ID NO: 10061 - DNA, 1443 bp, Neurospora crassa OR74A
  CDS (1)..(1443)
atgtctacctactccctctccgagactcacaaggccatgctcgagcatagcttggtcgagtccgacccccaggtcgccgagatcatgaagaaggaggttcagcgccagcgcgagtccatcatcctcatcgcctccgagaacgtcacctcgcgtgccgtcttcgatgccctcggctcccccatgtccaacaagtactcggagggtcttcccggcgcccgctactatggtggcaaccagcacatcgacgagatcgaggttctctgccagaaccgtgcccttgaggccttccacctcgaccccaagcagtggggtgtcaatgttcagtgcttgtccggcagccctgccaacctccaggtctaccaggccatcatgcccgtccacggcagactcatgggtcttgacctcccccacggtggccatctttcccacggttaccagaccccccagcgcaagatctctgctgtctctacctacttcgagaccatgccctaccgcgtcaacattgacactggtctcatcgactacgataccctcgagaagaacgcccagctcttccgccccaaggtcctcgtcgccggtacctctgcctactgccgtctgattgactacgagcgcatgcgcaagattgccgactccgttggcgcttaccttgtcgtcgatatggctcacatttccggcctcattgcctccgaggttatcccctcgcccttcctctacgccgatgtcgtcaccaccaccactcacaagtctctccgtggccctcgtggcgccatgatcttcttccgccgcggtgtccgctccgttgacgccaagaccggcaaggagaccctctacgaccttgaggacaagatcaacttctccgtcttccctggtcaccagggtggcccccacaaccacaccatcaccgcccttgccgttgccctcaagcaggctgcctcccccgagttcaaggagtaccagcagaaggtcgttgccaacgccaaggctctcgagaagaagctcaaggagctcggctacaagctcgtctctgacggcactgactctcacatggtcctcgttgaccttcgccccatcggcgtcgatggtgcccgtgttgagttcctccttgagcagatcaacattacctgcaacaagaacgccgttcccggcgacaagagcgccctcacccccggcggtctccgtattggtacccccgctatgacctcccgtggcttcggcgaggccgacttcgagaaggtcgccgtcttcgtcgatgaggctgtcaagctctgcaaggagatccaggcttccctccccaaggaggctaacaagcagaaggacttcaaggccaagatcgccaccagcgatattccccgcatcaacgagctcaagcaggagattgccgcctggagcaacaccttccccctccccgttgagggctggagatacgatgccggtctctaa

SEQ ID NO: 10062 - protein, 480 aa, Neurospora crassa OR74A
MSTYSLSETHKAMLEHSLVESDPQVAEIMKKEVQRQRESIILIASENVTSRAVFDALGSPMSNKYSEGLPGARYYGGNQHIDEIEVLCQNRALEAFHLDPKQWGVNVQCLSGSPANLQVYQAIMPVHGRLMGLDLPHGGHLSHGYQTPQRKISAVSTYFETMPYRVNIDTGLIDYDTLEKNAQLFRPKVLVAGTSAYCRLIDYERMRKIADSVGAYLVVDMAHISGLIASEVIPSPFLYADVVTTTTHKSLRGPRGAMIFFRRGVRSVDAKTGKETLYDLEDKINFSVFPGHQGGPHNHTITALAVALKQAASPEFKEYQQKVVANAKALEKKLKELGYKLVSDGTDSHMVLVDLRPIGVDGARVEFLLEQINITCNKNAVPGDKSALTPGGLRIGTPAMTSRGFGEADFEKVAVFVDEAVKLCKEIQASLPKEANKQKDFKAKIATSDIPRINELKQEIAAWSNTFPLPVEGWRYDAGL

SEQ ID NO: 10063 - DNA, 1584 bp, Neurospora crassa OR74A
  CDS (1)..(1584)
atgtcgagcttccagagcacagctgctgtgcgcgcctgcgcccgccgagcggcttctaccacctccgccgcgactctggcctcgacaacatgtcgcgccgccgcttcccggatacaattgcagggacagagaagcgcagggctggtacctaagagctggacgaggttctcctcgtcttcgattgctaatgacaatcagcaaaaggagaagcaaagacagaagcagttcatcaacctgatcccttccgagaacttcacatcccaggccgtcctcgatgctctaggaagccccatgcagaacaagtactctgaaggctatcccggagcgcgttattacggcggcaacgagttcatcgatgcttccgaaaggttatgccaggaccgagccctcgagacctttggcttggatcccaaggaatggggtgtcaacgtgcaagcgctctccggtgctcctgcgaacctctacgtctactcggccctcatggacacccacgaccgcttgatgggccttgacctcccccacggcggccatctttcgcacggttatcagactcccaccaaaaagatctccttcatctccaagtacttcgagacccttccctaccgtctcgatgagaagacgggctacatcgactacaacaagctcgaggagctggccatcacctaccgccccaagatcatcgtcgccggcgcctccgcttacagccgcctgatcgactacgcccgcctccgcgagatctgcgacaaggtcaacgcctacctcatggccgacatggcccacatctccggtctcgtggccgccaaggtcatgcccggccccttcacccacgccgacatcgtcaccaccaccagccacaagtccctccgcggcccccgcggcgccatgatcttcttccgccgcggcgtccgccgcaccaacaagaagggcgaggaggagctgtacaacctcgagacccccatcaacgcctccgtcttccccggccaccagggcgggccccacaaccacaccatcgccgccctcgccgtcgccctcaagcaggcccagacgcccgagttccgcgcctaccagagccaggtcctcgccaacgccacggcgctcgccgcccgcctcggcgagcccaaggacaagaacggcctgggctacaccattgtcagcggcggcaccgacaaccatctcgtcctgatcgacctcaagccgcagggcatcgacggcagccgcgtcgagcgcgtgctggaactcgtcggcgtcgctgccaacaagaataccgtccccggcgacaagtcggcgctgacgcctggcggtctacgcatcggcacgcccgccatgaccacgcgcgggttcacggaagaggactttgcgcgcgtggctgacatcatcgatcgcgccgtgaccattgctgtgcgcatcaacaaggcggccaaagaggatgcggtgaagaagggcaacgagaaggcggcgaaccgcgtcaagacgtttatggattacttgggcaatggcgagacggacccggagattgtccagctcaggagcgaggtggagagttgggtgggcacgtacccttgcccttgggaccagtcgtcttag

SEQ ID NO: 10064 - protein, 527 aa, Neurospora crassa OR74A
MSSFQSTAAVRACARRAASTTSAATLASTTCRAAASRIQLQGQRSAGLVPKSWTRFSSSSIANDNQQKEKQRQKQFINLIPSENFTSQAVLDALGSPMQNKYSEGYPGARYYGGNEFIDASERLCQDRALETFGLDPKEWGVNVQALSGAPANLYVYSALMDTHDRLMGLDLPHGGHLSHGYQTPTKKISFISKYFETLPYRLDEKTGYIDYNKLEELAITYRPKIIVAGASAYSRLIDYARLREICDKVNAYLMADMAHISGLVAAKVMPGPFTHADIVTTTSHKSLRGPRGAMIFFRRGVRRTNKKGEEELYNLETPINASVFPGHQGGPHNHTIAALAVALKQAQTPEFRAYQSQVLANATALAARLGEPKDKNGLGYTIVSGGTDNHLVLIDLKPQGIDGSRVERVLELVGVAANKNTVPGDKSALTPGGLRIGTPAMTTRGFTEEDFARVADIIDRAVTIAVRINKAAKEDAVKKGNEKAANRVKTFMDYLGNGETDPEIVQLRSEVESWVGTYPCPWDQSS

SEQ ID NO: 10065 - DNA, 1383 bp, Encephalitozoon cuniculi GB-M1
  CDS (1)..(1383)
atgacagatgcaagagaaaagggcttctggacaggcccgctggagatggcagaccccgagctccatgccctgatctgcggagaggtcgagaggcagaagaagacaataaacctgatagcaagcgagaactatgcgcatcagagcgcgatggaggcctgtgggtctgtcctcaccaacaagtattcagaaggcagggtgggagagcgatactacggggggacgcactgggtcgacaggatcgagctcctctgccagaagagggctctcgagctcttcgggctggatcctgacgtctggggcgtcaatgtccagccatactcggggagcccagccaactttgcaatctacacggccgttgtccctccgggcgggaggatcatgggccttgacctgccgtctggaggacacctgacccatggatacaagacgaagaccaggaagatatctgcctcaagcgtctacttcgactcaaggccatacacagtggggagcaacggcctcatcgactacgagggcctcgagaagaccttcacggactttctgccgcacatcctgatctgcggatacagcgcatactccagagacatcgactacaagaggctgcagtcgatagccggcaggaacggtgcctttctgtttgcagacatctcgcacatctcgccgctggttgcgtctgggctgatgaacagcccgttcgagcactgcgacattgtcatgacgacaacgcagaaggggctccggggacctcgaggggcgctcatcttctacaggagggccgtgacaaagaatggggagactgtggatctggatgcccggatcaactttgccgtgtttccgatgctgcagggaggcccccacaaccacacgattgcagggattgcctctgcacttctccatgcaggaactcccgagtttgcggagtacacaaggcgcgtggtggagaactcgagggagctgtgcagccgcttgcagtctctgggccttgacatcctgacggggggaacggacaaccacatgctccttgtggatctccggagcacgggtgtcgacggggcggctgtggagcacatgtgcgatgccctgggcatcagcctgaacagaaacgccattgtcggaaactccagcccgctgagcccgtctggaatacgtgtgggcacatatgcagtcactgccaggggatttggccccgaggagatgagggaggttggagacataatcggcggggtagtcaagctctgcagggagatgacgggcggcaggaagatgtcgaaggccgatctccacagagtgacgtccgatgcccgggtcatgggcagcgagcaggttttagtgctgagaagaagagtgtgtgccctggcagaggcatatcccatctacgaatga

SEQ ID NO: 10066 - protein, 460 aa, Encephalitozoon cuniculi GB-M1
MTDAREKGFWTGPLEMADPELHALICGEVERQKKTINLIASENYAHQSAMEACGSVLTNKYSEGRVGERYYGGTHWVDRIELLCQKRALELFGLDPDVWGVNVQPYSGSPANFAIYTAVVPPGGRIMGLDLPSGGHLTHGYKTKTRKISASSVYFDSRPYTVGSNGLIDYEGLEKTFTDFLPHILICGYSAYSRDIDYKRLQSIAGRNGAFLFADISHISPLVASGLMNSPFEHCDIVMTTTQKGLRGPRGALIFYRRAVTKNGETVDLDARINFAVFPMLQGGPHNHTIAGIASALLHAGTPEFAEYTRRVVENSRELCSRLQSLGLDILTGGTDNHMLLVDLRSTGVDGAAVEHMCDALGISLNRNAIVGNSSPLSPSGIRVGTYAVTARGFGPEEMREVGDIIGGVVKLCREMTGGRKMSKADLHRVTSDARVMGSEQVLVLRRRVCALAEAYPIYE

SEQ ID NO: 10067 - DNA, 1482 bp, Tribolium castaneum
  CDS (1)..(1482)
atgttttcgcgcgctttttcaaccgccaaccacctgttgaacaaccggaatctgcaaagactcgctgtgacccagttaaggaaaatgagtcaacaagtgctgcattcaaacgtttgggactccgatcccgaactttttgccctcattcaggaggaaaaaaagcgacaattgaccggtttggaaatgattgcgtcggaaaatttcacctcactgcctgtattacaatgtttgagcacttgcctgcataataagtattcggaaggtttgcctggacaaaggtattatgggggcaaccaatttatcgatcagatcgaacgtttagctcaaaagcgggccttggaagcttacagactaaatccagaagaatggggtgtgaatgtgcagccctattctgggtcacctgccaattttgccgtctacacaggattggttgaggcgcacggacgtattatggggttggatttgcctgatgggggccatttgactcatggattcttcactgcgactaagaaaatctcagctacctccatattcttcgaatcgctgccatataaggtcgatgtcgaaaccggcctcatcgactacgagcagctcgccaaaactgcccgtctattcaaaccccgtattattatcgccggtatcagttgctactcccgtcctctggactacaaacgtttccgcgagatttgcaacgaagtcggtgcctacctcatggccgacatggcccacatttccggtttagttgctgccggcgtcaccccaagtcccttcgaatacgccgacgtcgtcagcaccaccacgcacaagagtttgcgaggacctcgagccggtgtcatcttcttccgaaaaggcgtgcggtcgcataacgctaaaggcgaacccattatgtatgatcttgaatcgaagatcaaccaagctgtctttcccggtctccaagggggcccccacaataacaccatcgctgccattgccaccaccatgaaacaggccaccacgccagaatttgttgagtatcagaagcagattattgcgaatgcgaaacgactctgtaaggggttgcaggacaagggatacaagattgccaccggtggaaccgatgtgcacctgttgctggtcgatttgagaaatgtaggacttacgggggccaaggctgagtttatccttgaagaagtttcaattgcgtgtaataaaaatacagttcctggagataaaagcgcattgaatccatcagggattaggttgggaacgccggctttgaccacaagagggcttgtggagaaagatatggatcaagttgtggagtttattgataaagcgttgaaattggcaaaagaaattggaaccaaatcagggcctaaattggtggatttcaaaaagacgattgaatgtgacgaggaaactaaaaagaaggtggcggatttgagagctcaagttgaagagtatagctgtaaattccccatgcctggatatcccgaatattga

SEQ ID NO: 10068 - protein, 493 aa, Tribolium castaneum
MFSRAFSTANHLLNNRNLQRLAVTQLRKMSQQVLHSNVWDSDPELFALIQEEKKRQLTGLEMIASENFTSLPVLQCLSTCLHNKYSEGLPGQRYYGGNQFIDQIERLAQKRALEAYRLNPEEWGVNVQPYSGSPANFAVYTGLVEAHGRIMGLDLPDGGHLTHGFFTATKKISATSIFFESLPYKVDVETGLIDYEQLAKTARLFKPRIIIAGISCYSRPLDYKRFREICNEVGAYLMADMAHISGLVAAGVTPSPFEYADVVSTTTHKSLRGPRAGVIFFRKGVRSHNAKGEPIMYDLESKINQAVFPGLQGGPHNNTIAAIATTMKQATTPEFVEYQKQIIANAKRLCKGLQDKGYKIATGGTDVHLLLVDLRNVGLTGAKAEFILEEVSIACNKNTVPGDKSALNPSGIRLGTPALTTRGLVEKDMDQVVEFIDKALKLAKEIGTKSGPKLVDFKKTIECDEETKKKVADLRAQVEEYSCKFPMPGYPEY

SEQ ID NO: 10069 - DNA, 1245 bp, Campylobacter jejuni subsp. jejuni 81-176
  CDS (1)..(1245): transl_table=11
atgagtttagaaatgtttgataaagaaatttttgatttaacaaacaaagagttagagcgtcaatgtgaaggtcttgaaatgatagcgagtgaaaatttcactttacctgaagtaatggaagttatgggaagtatcttgacaaacaaatacgcagaaggttatccaggtaaaagatattatggtggttgtgaatttgttgatgagattgaaactctagccattcaaagatgtaaaaaactttttaattgtaaatttgctaatgttcagcctaattcaggttctcaagctaatcaaggtgtttatgcggctttgattaatccaggtgataaaattttaggaatggatttaagtcatggtggacatttaactcatggtgcaaaagtaagttcttcgggcaaaatgtatgaaagctgtttttacggcgtagagcttgatggaagaattgattatgaaaaagtaagagaaattgctaaaaaagaaaaaccaaaacttatagtttgtggagctagtgcttatgcaagagtgattgattttgctaaatttagagaaattgctgatgaaataggtgcctatctttttgctgatatagcacatattgcaggtcttgttgtggcaggtgagcatccaagtccttttccatacgctcatgtagtaagctcaactacacataaaactttgcgtggcccaaggggcggtattattatgacaaatgatgaagagtttgctaaaaaaattaattctgcgatttttccaggtattcagggtggtcctttgatgcatgtaattgctgcaaaagcagtaggatttaaatttaatcttagcgatgagtggaaaatttatgcaaaacaagtaagaaccaatgctcaagttttagctaatgttttaatggatagaaaatttaaacttgttagcgatggaacggataatcaccttgttttaatgagttttttagatcgcgaatttagcggaaaagatgcagatttagctcttggaaatgcaggtattactgcaaataaaaatactgttccaggagagattagaagtccttttatcacaagtggattaagacttggaactccagcccttactgccagaggttttaaggaaaaagaaatggaaattgtgtcaaattatattgcagatattttagatgatattaataatgaaaaattacaagagaatattaaacaagaattaaaaaaacttgcaagtaattttattatttatgaaagggctatgttttga

SEQ ID NO: 10070 - protein, 414 aa, Campylobacter jejuni subsp. jejuni 81-176
MSLEMFDKEIFDLTNKELERQCEGLEMIASENFTLPEVMEVMGSILTNKYAEGYPGKRYYGGCEFVDEIETLAIQRCKKLFNCKFANVQPNSGSQANQGVYAALINPGDKILGMDLSHGGHLTHGAKVSSSGKMYESCFYGVELDGRIDYEKVREIAKKEKPKLIVCGASAYARVIDFAKFREIADEIGAYLFADIAHIAGLVVAGEHPSPFPYAHVVSSTTHKTLRGPRGGIIMTNDEEFAKKINSAIFPGIQGGPLMHVIAAKAVGFKFNLSDEWKIYAKQVRTNAQVLANVLMDRKFKLVSDGTDNHLVLMSFLDREFSGKDADLALGNAGITANKNTVPGEIRSPFITSGLRLGTPALTARGFKEKEMEIVSNYIADILDDINNEKLQENIKQELKKLASNFIIYERAMF

SEQ ID NO: 10071 - DNA, 1251 bp, Halorhodospira halophila SL1
  CDS (1)..(1251): transl_table=11
atgttctcccgagatatgaccattgcgggttacgacccggagctggcagccgccatcgaggacgagcgccagcgccaggaggatcacatcgagctgatcgcctccgagaactacgccagtccccgcgtgatggaagcgcagggcagcgtgctgaccaacaagtacgccgaagggtacccgggcaagcgctactacggcggctgtgagcacgtcgacgtagccgagcagctggccatcgaccgcgccaagcagctcttcggcgccgactacgccaacgtccagccccactcgggctcccaggccaacgccgccgtcttccacgccctgctcaagcccggcgacaccatcctgggcatgagcctcgaccacggcggccacctgacccacggcgccaaggtcaacttctccggcaagctgttcaacgccgtgcagtacggcatcaacgacgacggccagatcgactacgacgagatccagcgcctggccaccgaacaccagccgaagatggtcatcggcggcttctccgcctactcccaagtggtcgattgggcgcgcctgcgccagatcgccgactcggtgggcgcctacctggtcgtcgatatggcccacatcgccggcctggtggccgccggggtctaccccagcccgatcccccacgccgacgcggtgacctccaccacccacaagaccctgcgcggcccgcgcggcggcatcatcctggcccgctccaacccggacctggagaagaaattccagtcgctggtcttcccggggacccagggcggcccgctgatgcacgccatcgccggcaaggccgtggccttcaaggaggccctcgagcccgacttcaagcagtaccaggagcaggtggtggccaacgcccgcgccatggcccggcgcgtcatcgagcgcggctacaacgtcgtctccggcggtaccgacaaccacctcttcctgatggatctgacccccaagaacctcaccggcaaggatgcggacgccgcgctggggcgggccaacatcacggtcaacaagaacaccgtgcccaacgatccgcagtcgccgttcgtcaccagcggtctgcgcatcggcacgccggcgatcaccacccgtggtttcaaggaggccgaggccacccgcctggctgactggatctgtgacgtcctcgacaacatgggcgacgagtccgtcgtcgagcgcgtgcgcggcgaggtggagcagatctgtcgcgaattccccgtctacgggtga

SEQ ID NO: 10072 - protein, 416 aa, Halorhodospira halophila SL1
MFSRDMTIAGYDPELAAAIEDERQRQEDHIELIASENYASPRVMEAQGSVLTNKYAEGYPGKRYYGGCEHVDVAEQLAIDRAKQLFGADYANVQPHSGSQANAAVFHALLKPGDTILGMSLDHGGHLTHGAKVNFSGKLFNAVQYGINDDGQIDYDEIQRLATEHQPKMVIGGFSAYSQVVDWARLRQIADSVGAYLVVDMAHIAGLVAAGVYPSPIPHADAVTSTTHKTLRGPRGGIILARSNPDLEKKFQSLVFPGTQGGPLMHAIAGKAVAFKEALEPDFKQYQEQVVANARAMARRVIERGYNVVSGGTDNHLFLMDLTPKNLTGKDADAALGRANITVNKNTVPNDPQSPFVTSGLRIGTPAITTRGFKEAEATRLADWICDVLDNMGDESVVERVRGEVEQICREFPVYG

SEQ ID NO: 10073 - DNA, 1254 bp, Yersinia enterocolitica subsp. enterocolitica 8081
  CDS (1)..(1254): transl_table=11
atgttaaagcgtgaaatgaacattgccgattatgatgcagatctatggcgtgcaatggagcaagaagtggtgcgccaggaagagcacatcgagctgattgcctctgagaactacactagcccgcgcgttatgcaggctcagggttctcagttgacgaacaaatatgctgaaggctatccgggcaagcgttactacggtggctgtgagtatgtcgatattgttgagcagttggctattgaccgtgcaaaagagttgttcggcgcagattacgccaacgttcagccgcattccggttctcaggcgaacgtggcggtttactccgccttgctgcaaccgggtgacactgttttggggatgaacctggcgcacggcggccatttgacccacggctcaccggttaacttctctggcaaactgtacaatatcgtcccttacggcattgatgagtctggcaaaattgattatgaagatatggcgagtcaggccgaacgttataaaccgaaaatgatcatcggcggcttctctgcttattccggtattgttgattgggcaaaaatgcgcgaaatcgctgacagcatcggcgcatatttctttgtcgatatggctcacgtcgccggtctggtggctgctggcgtttatcctaacccagttccacatgcacatgtcgtaaccactaccacgcacaaaacactggctggcccacgcggtggcttgattttggcgagaggtggtgatgaagagctgtataaaaaactgaactcttctgtgttcccagccaaccaaggcggcccattgatgcatgttatcgccggtaaagcggtggcattgaaagaagcgatggagcctgagttcaaagtttaccaacaacaagtggctaagaacgccaaagctatggtggcggtcttcctggaacgcggctataaagtggtttctggcggtacagataaccacttgttcttgcttgatttggtcgacaaaaacatcaccggtaaagatgccgatgctgctttggggcgtgccaatatcacggtaaataagaatagcgtgcctaacgatccgaaaagcccgtttgtcacttctggtgtgcgtatcggtagcccggcgattactcgccgtggtttcaaagaagaagaatcgcgcgagctggctggctggatgtgtgatgtgttggataacatcaccgacgaagcgactatcgagcgcatcaaacagaaagtattggctatttgcgcccgtttcccggtttacgcataa

SEQ ID NO: 10074 - protein, 417 aa, Yersinia enterocolitica subsp. enterocolitica 8081
MLKREMNIADYDADLWRAMEQEVVRQEEHIELIASENYTSPRVMQAQGSQLTNKYAEGYPGKRYYGGCEYVDIVEQLAIDRAKELFGADYANVQPHSGSQANVAVYSALLQPGDTVLGMNLAHGGHLTHGSPVNFSGKLYNIVPYGIDESGKIDYEDMASQAERYKPKMIIGGFSAYSGIVDWAKMREIADSIGAYFFVDMAHVAGLVAAGVYPNPVPHAHVVTTTTHKTLAGPRGGLILARGGDEELYKKLNSSVFPANQGGPLMHVIAGKAVALKEAMEPEFKVYQQQVAKNAKAMVAVFLERGYKVVSGGTDNHLFLLDLVDKNITGKDADAALGRANITVNKNSVPNDPKSPFVTSGVRIGSPAITRRGFKEEESRELAGWMCDVLDNITDEATIERIKQKVLAICARFPVYA

SEQ ID NO: 10075 - DNA, 1275 bp, Prochlorococcus marinus str. MIT 9303
  CDS (1)..(1275): transl_table=11
atgacggatcgctgcttggcttctattaatgctgccctgacggattccgacccggcgattgcaggcttgatcgatcaggagaggcaacgtcaggagacccatctagagctgatagccagtgagaacttcacttctcaagctgtgatgcaggctcagggttctgtgctcactaacaagtacgccgaaggtcttccccataagcgctattacggcggttgtgagcatgtcgatgcgattgaggagttggcgatcgagcgtgctcggcggctctttggtgcggcttgggccaacgtgcaacctcatagtggcgcgcaggccaacttcgctgtcttcctggcgcttttgcagcctggtgacaccatcatggggatggatctatcccatggggggcatctcactcatggttctcctgtcaatgtcagcggcaagtggttcaaggtcgttcattacggcgtggagcctgatagtcagcagctcgacatggaggctgtgcgtcagctggccctgaaagagcgtcctcaactgattatctgcggctactcggcctatccccgcacgatcgattttgctgcttttcgcagcatcgctgatgaggtgggcgcttacttgttggcggacatggcacacattgccggccttgttgcggccggggtccatccgagtcctatcgcccactgtgatgtggtgacgacgaccacccacaagacattgcgtggccccagaggcggcttaatcctttgtcgtgatgcggactttggccgtaagtttgacaaggcagtgtttcctggcagtcagggcggccctttggaacatgtgatcgcagccaaggctgtggccttaggagaagctcttcagccagagttccatgcttatagctgccaggtggtggcgaatgcccaggttcttgctggtcgcattcaggagcgcgggattgcggttgtgagtggaggaacagataatcaccttgtcttgctggatctgcgcagcattgggatgaccgggaaggttgctgatttgcttgtcagtgacgtaaacatcaccgccaataagaacacagtgccctttgatcctgagtcgccttttgtgaccagtggtctgcgcttgggcacggcggctctaacaactcgtggctttgatgaggaggcattccgtgaggttgctgatgtgattgcagatcgtttgcttaaaccgcaagatgaatcgattaaggcgcagtgcttggaacgggtgagacaactttgtggccgtttccctctctacaggggttccctctag

SEQ ID NO: 10076 - protein, 424 aa, Prochlorococcus marinus str. MIT 9303
MTDRCLASINAALTDSDPAIAGLIDQERQRQETHLELIASENFTSQAVMQAQGSVLTNKYAEGLPHKRYYGGCEHVDAIEELAIERARRLFGAAWANVQPHSGAQANFAVFLALLQPGDTIMGMDLSHGGHLTHGSPVNVSGKWFKVVHYGVEPDSQQLDMEAVRQLALKERPQLIICGYSAYPRTIDFAAFRSIADEVGAYLLADMAHIAGLVAAGVHPSPIAHCDVVTTTTHKTLRGPRGGLILCRDADFGRKFDKAVFPGSQGGPLEHVIAAKAVALGEALQPEFHAYSCQVVANAQVLAGRIQERGIAVVSGGTDNHLVLLDLRSIGMTGKVADLLVSDVNITANKNTVPFDPESPFVTSGLRLGTAALTTRGFDEEAFREVADVIADRLLKPQDESIKAQCLERVRQLCGRFPLYRGSL

SEQ ID NO: 10077 - DNA, 1239 bp, Clostridium thermocellum ATCC 27405
  CDS (1)..(1239): transl_table=11
atgtttaatttgaatgaaatatcaaaaatcgatcccgaagttgcgaaggcaattgaattggaggttaatcgtcagagaaacaagatagagcttattgcatctgaaaattttgtcagtaaagccgtaatagaagcaatgggtacacctctgaccaacaagtatgctgaaggatatccgggaaaaaggtattacggaggctgtgagtttgttgacataattgaaaatcttgcgattgaacgggcaaagaaaatattcggagctgagcatgcgaatgtgcagccgcattcaggggctcaggcaaatatggctgtgttttttgcagtgttaaatcccggagatacgattcttggaatgaatctttcccatggagggcatttgagccatggaagccctgtcaacatgtccggaaaatattataatgtcatatcctacggagtaaggaaggaagactgcagaatagactatgacgaagtgagaaagcttgcaaaggaacacaggccgaaacttatagtggcgggagccagtgcatatccaagaataatagattttaaggctttcagagatattgcggatgaagtcggagcatatttgatggtggatattgcacatatagcaggtcttgttgcagcaggactgcacccgaatcctgttccttatgcacattttgttaccaccaccactcacaagactttgagaggtccgagaggcggactgatattgtgcggcaatgagcatgcaaaaatgattgacaaggctgttttcccgggaatacagggcggtcctctgatgcatgttattgcggcaaaagcggtaagctttgccgaagtattgaccgatgaattcaagcagtatcagcagcagatagtaaaaaatgcgaaaactcttgccaacgctttgatggagaaaggcattgaccttgtttccggtggaacggacaaccatctcatgctggttgatttaagaaataaaggtcttacgggtaaatacgttcagcatattcttgatgaggtttgcattaccgtaaataaaaacggaattccttttgaccctgaaagtccgtttgttaccagcggtatcagaataggaacacctgcggtgacggcacggggtatgaaagaagaggatatggttgagatagcggatcttatcaatctcaccattacggattatgagaattcgaaagagaaagtaaaggaaagagtaagaatgctatgcgaaaaatatcctttgtatcagtaa

SEQ ID NO: 10078 - protein, 412 aa, Clostridium thermocellum ATCC 27405
MFNLNEISKIDPEVAKAIELEVNRQRNKIELIASENFVSKAVIEAMGTPLTNKYAEGYPGKRYYGGCEFVDIIENLAIERAKKIFGAEHANVQPHSGAQANMAVFFAVLNPGDTILGMNLSHGGHLSHGSPVNMSGKYYNVISYGVRKEDCRIDYDEVRKLAKEHRPKLIVAGASAYPRIIDFKAFRDIADEVGAYLMVDIAHIAGLVAAGLHPNPVPYAHFVTTTTHKTLRGPRGGLILCGNEHAKMIDKAVFPGIQGGPLMHVIAAKAVSFAEVLTDEFKQYQQQIVKNAKTLANALMEKGIDLVSGGTDNHLMLVDLRNKGLTGKYVQHILDEVCITVNKNGIPFDPESPFVTSGIRIGTPAVTARGMKEEDMVEIADLINLTITDYENSKEKVKERVRMLCEKYPLYQ

SEQ ID NO: 10079 - DNA, 1254 bp, Shewanella baltica OS155
  CDS (1)..(1254): transl_table=11
atgctgaaaaaagatatgaatatcgcagattatgatccggaactgtttaaggcaattcagaatgaaactctgcgtcaagaagagcatattgagctgattgcttctgaaaactacaccagtccacgcgtgatggaagcgcaaggttcacagttaaccaataagtacgctgaaggctatccaggcaagcgttactacggtggttgtgagtatgtggacgtagttgaaaccttagcgattgaacgtgctaaagaattgtttggcgcaacttacgctaacgtacaacctcattcaggttcacaggcaaacagcgctgtttacatggcattgttaaaacctggcgataccgtactgggcatgaacttagcccacggtggtcacttgacccacggttcacccgttaacttctctggcaaactgtacaatatcattccttacggtatcgacgagtcaggtaaaattgactacgacgaaatggaacgtctggccgtagaacataagcctaaaatgatgatcggcggtttctctgcctattctggtatcgttgactgggcaaaaatgcgtgaaatcgcagacaaaataggtgcttacctatttgtcgatatggcgcacgttgccggtcttatcgctgcgggtgtttatccaaacccagttccacacgcgcacgttgtgacatcaacgacccataaaactttagccggtcctcgtggtggcgtgatcctgtctgctgctgatgatgaagacttgtataagaagttgaattcagcggtattcccaggcggtcaaggtggcccattaatgcacgttatcgctggtaaagcggttgcgttcaaagaagcactagagccagaatttaaagtgtaccaacagcaagtagttaataacgctaaagctatggttgaagtgttccttgagcgcggttacaaaatcgtctctggcggaaccagcaaccacttaatgctagttgacctgattggtcgtgacttgaccggtaaagaagccgatgccgctttaggtagcgctaacattaccgtgaacaaaaactcagtgccaaacgacccacgttcaccttttgtgacctcaggtgtgcgtatcggtacgccagccattacgcgccgcggctttaaagaagtggaatcgaaagagctgactggctggatttgtgacatccttgatgatgcaagcaatcctgctgtgattgagcgtgttaagggccaagtattggcactgtgtgcacgtttccctgtttacggctaa

SEQ ID NO: 10080 - protein, 417 aa, Shewanella baltica OS155
MLKKDMNIADYDPELFKAIQNETLRQEEHIELIASENYTSPRVMEAQGSQLTNKYAEGYPGKRYYGGCEYVDVVETLAIERAKELFGATYANVQPHSGSQANSAVYMALLKPGDTVLGMNLAHGGHLTHGSPVNFSGKLYNIIPYGIDESGKIDYDEMERLAVEHKPKMMIGGFSAYSGIVDWAKMREIADKIGAYLFVDMAHVAGLIAAGVYPNPVPHAHVVTSTTHKTLAGPRGGVILSAADDEDLYKKLNSAVFPGGQGGPLMHVIAGKAVAFKEALEPEFKVYQQQVVNNAKAMVEVFLERGYKIVSGGTSNHLMLVDLIGRDLTGKEADAALGSANITVNKNSVPNDPRSPFVTSGVRIGTPAITRRGFKEVESKELTGWICDILDDASNPAVIERVKGQVLALCARFPVYG

SEQ ID NO: 10081 - DNA, 1248 bp, Burkholderia pseudomallei 1106a
  CDS (1)..(1248): transl_table=11
atgtttgacagagcccaaagcaccattgcgaacgtcgatcccgagatctggcaagcgattcagcaggaaaacgtccgtcaggaagagcacatcgagctgatcgcgtcggagaattacacgagcccggccgtgatggcggcgcaaggctcgcaactgacgaacaagtacgcggaaggctatccgggcaagcgctattacggcggctgcgaatacgtggacatcgtcgagcagctcgcgatcgatcgcgtgaaggcgctgttcggcgccgaagcggcgaacgtgcagccgaactcgggctcgcaggcgaaccagggcgtgttcttcgcgatgctcaagccgggcgacacgatcatgggcatgagcctcgcgcacggcggccacctcacgcacggctcgccggtgaacatgtcgggcaagtggttcaacgtcgtgagctacgggctgaacgaggctgaagacatcgattacgaagcggccgagcagctcgcgcacgagcacaagccgaagctgatcgtcgcgggcgcgtcggcgttcgcgctgaagatcgatttcgagcgcctcgcgaagatcgccaaggcagtgggcgcgtacctgatggtcgacatggcgcactacgcgggcctgatcgcggcgggtgtctatccgaacccggtgccgcatgcggatttcgtcacgacgacgacgcacaagagcctgcgcggcccgcgcggcggcgtgatcctgatgaaggccgagtacgagaagcagatcaactcggcgatcttcccgggcgtccagggcggaccgctgatgcacgtgatcgccgcgaaggccgtcgcgttcaaggaagcgctgtcgccggaattcaaggaataccagcagaaggtggtcgagaacgcccgcgtgctggcgcaaacgctcgtcaagcgcggcctgcgcatcgtgtcgggccgcaccgagagccatgtgatgctggtcgacctgcgcgcgaagaacatcacgggcaaggcggcggaagcggcgctcggcaatgcgcacatcacggtcaacaagaacgcgatcccgaacgatccggagaagcccttcgtgacgagcggcgtgcgcctgggctcgccggcgatgacgacgcgcggcttcggcccgcaggaagcggagctcgtcggcaacctgatcgccgacgtgctcgagcatcccgaagacgcggcgacgatcgagcgcgtgcgtgcgcaggtcgccgagctgacgaagcgtttcccggtctatcgctga

SEQ ID NO: 10082 - protein, 415 aa, Burkholderia pseudomallei 1106a
MFDRAQSTIANVDPEIWQAIQQENVRQEEHIELIASENYTSPAVMAAQGSQLTNKYAEGYPGKRYYGGCEYVDIVEQLAIDRVKALFGAEAANVQPNSGSQANQGVFFAMLKPGDTIMGMSLAHGGHLTHGSPVNMSGKWFNVVSYGLNEAEDIDYEAAEQLAHEHKPKLIVAGASAFALKIDFERLAKIAKAVGAYLMVDMAHYAGLIAAGVYPNPVPHADFVTTTTHKSLRGPRGGVILMKAEYEKQINSAIFPGVQGGPLMHVIAAKAVAFKEALSPEFKEYQQKVVENARVLAQTLVKRGLRIVSGRTESHVMLVDLRAKNITGKAAEAALGNAHITVNKNAIPNDPEKPFVTSGVRLGSPAMTTRGFGPQEAELVGNLIADVLEHPEDAATIERVRAQVAELTKRFPVYR

SEQ ID NO: 10083 - DNA, 1254 bp, Shewanella loihica PV-4
  CDS (1)..(1254): transl_table=11
atgctgaaaaaagagatgaacatcgctgactttgatccgcaactgtttcaagcgatccaggaagagactcgtcgtcaagaagagcacatcgagctaatcgcctcggagaactacacctctcctcgcgtgatggaggctcaaggttctcagctgacgaacaagtacgccgaaggctatcctggcaagcgttactacggtggttgtgaacatgtcgacatcgttgagaacctggccatcgaacgcgccaaggaacttttcggtgcgacctatgctaacgttcagcctcactccggctcacaggctaacagcgcagtctacatggcgctactgcaaccaggcgataccgttctgggtatgaacctggctcacggcggtcacctgacgcacggctctccagtaaacttctctggcaagctatacaacatagttccttacggcatcgacgagtctggcaagatcgactacgacgagatggagcgtctggccgttgagcacaagcctaagatgatgatcggtggtttctctgcctattctggtatcgtcgactgggcgcgcatgcgtgaaatcgccgacaagattggcgcttacctgtttgtcgacatggcgcacgttgcaggccttatcgcagccggtgtctatccaaaccctgtgccacacgcacacgtggtaacttctactactcacaagaccctagccggtcctcgcggcggtattattctgtctgcggcgaacgatgaagacttgtacaagaagctgaactctgcggtattcccaggtggtcagggtggcccattgatgcacgttatcgcgggtaaggcggtagccttcaaggaagcgctgtctcctgagttcaaggaatatcaacagcaggtagtagttaacgctaaggcgatggctaacaccttcatcgagcgtggttttgatgtggtttctggcggcaccgaaaaccacctgttcctgctggacctgatcgctaaagatattacaggtaaagatgccgatgcggcgctgggccgtgccaacatcacggtaaacaagaactcagtacctaacgacccacgttcacctttcgtgacctcgggcctgcgtatcggttcgccagccatcacacgtcgtggcttcaaagaagccgaagcggttgagctgaccaactggatctgtgatgtgttagatgacatcaacaacgaagccactatcgagcgcgtgaagaaccaggtgcttgaattgtgcgctaagttccctgtttacggttaa

SEQ ID NO: 10084 - protein, 417 aa, Shewanella loihica PV-4
MLKKEMNIADFDPQLFQAIQEETRRQEEHIELIASENYTSPRVMEAQGSQLTNKYAEGYPGKRYYGGCEHVDIVENLAIERAKELFGATYANVQPHSGSQANSAVYMALLQPGDTVLGMNLAHGGHLTHGSPVNFSGKLYNIVPYGIDESGKIDYDEMERLAVEHKPKMMIGGFSAYSGIVDWARMREIADKIGAYLFVDMAHVAGLIAAGVYPNPVPHAHVVTSTTHKTLAGPRGGIILSAANDEDLYKKLNSAVFPGGQGGPLMHVIAGKAVAFKEALSPEFKEYQQQVVVNAKAMANTFIERGFDVVSGGTENHLFLLDLIAKDITGKDADAALGRANITVNKNSVPNDPRSPFVTSGLRIGSPAITRRGFKEAEAVELTNWICDVLDDINNEATIERVKNQVLELCAKFPVYG

SEQ ID NO: 10085 - DNA, 1248 bp, Burkholderia vietnamiensis G4
  CDS (1)..(1248): transl_table=11
atgttcaatcgcactaccagcaccgtcgcgaacgtcgatcccgagatctttgctgcgatcgagcaggaaaaccgccgccaggaagaccacatcgagttgatcgcgtcggaaaactacacgagcccggccgtgatggccgcacagggctcgcagctcacgaacaagtacgcggaaggttatccgggcaagcgctactacggcggctgcgagtacgtcgacgtggtcgagcagctggcgatcgatcgcgtgaagcagctgttcggcgcggaagcggcgaacgtgcagccgaactcgggctcgcaggcgaaccagggcgtgttcttcgcgatgctcaagccgggcgacacgatcatggggatgagcctggcgcacggtgggcacctgacgcacggctcgccggtgaacatgtcgggcaagtggttcaacgtggtgagctacgggctgaacgaaaacgaagacatcgattacgacgcggcggaaaagctcgcgcaggagcacaagccgaagctgatcgtcgcgggcgcctcggcgttcgcgctgaagatcgacttcgcgcgtatggcgcagatcgcgaagtcggtcggcgcgtacctgatggtggacatggcgcactacgctgggctgatcgcggcgggcgtgtatccgaacccggtgccgcacgctgatttcgtgacgacgaccacgcacaagagcctgcgcggcccgcgcggcggcgtgatcctgatgaaggcggagtacgagaagcagatcaactcggcgatcttcccgggcatccagggcggcccgctgatgcacgtgatcgcggcgaaggcggtggcgttcaaggaagcgctgtcgccggagttcaaggcgtatcagcaaaaggtggtggagaacgcgcgggtgctggccgagacgctggtgaaacgcgggctgcggatcgtgtcgggccgcacggaaagccacgtgatgctggtggacctgcgcgcgaagcacatcacgggcaaggcggcggaagcggcgctgggtgcggcgcacatcacggtgaacaagaacgcgattccgaacgatccggaaaagccgttcgtgacgagcggcgtgcggctgggctcgccggcgatgacgacgcgcggcttcggtccggcggaagcggagcaggtgggcaacctgatcgcggacgtgctggagaacccggaagatgcggcgacgctcgagcgcgtgcgcgcgcaagtggccgagctgaccaagcgtttcccggtctacgggtga

SEQ ID NO: 10086 - protein, 415 aa, Burkholderia vietnamiensis G4
MFNRTTSTVANVDPEIFAAIEQENRRQEDHIELIASENYTSPAVMAAQGSQLTNKYAEGYPGKRYYGGCEYVDVVEQLAIDRVKQLFGAEAANVQPNSGSQANQGVFFAMLKPGDTIMGMSLAHGGHLTHGSPVNMSGKWFNVVSYGLNENEDIDYDAAEKLAQEHKPKLIVAGASAFALKIDFARMAQIAKSVGAYLMVDMAHYAGLIAAGVYPNPVPHADFVTTTTHKSLRGPRGGVILMKAEYEKQINSAIFPGIQGGPLMHVIAAKAVAFKEALSPEFKAYQQKVVENARVLAETLVKRGLRIVSGRTESHVMLVDLRAKHITGKAAEAALGAAHITVNKNAIPNDPEKPFVTSGVRLGSPAMTTRGFGPAEAEQVGNLIADVLENPEDAATLERVRAQVAELTKRFPVYG

SEQ ID NO: 10087 - DNA, 1296 bp, Burkholderia vietnamiensis G4
  CDS (1)..(1296): transl_table=11
atgtactcggccgcaccggtcaacctgtacacacttaacggaaaccgtatgtttgacagagcccaaagcaccatcgcgaacgtcgatcccgagatctttgctgcgatcgagcaggaaaaccgccgccaggaagaccacatcgagttgatcgcgtcggaaaactacacgagcccggccgtgatggccgcacagggctcgcagctcacgaacaagtacgcggaaggttatccgggcaagcgctactacggcggctgcgagtacgtcgacgtggtcgagcagctggcgatcgatcgcgtgaagcagctgttcggcgcggaagcggcgaacgtgcagccgaactcgggctcgcaggcgaaccagggcgtgttcttcgcgatgctcaagccgggcgacacgatcatggggatgagcctcgcgcacggcgggcacctgacgcacggctcgccggtgaacatgtcgggcaagtggttcaacgtggtgagctacgggctgaacgaaaacgaagacatcgattacgacgcggcggaaaagctcgcgcaggagcacaagccgaagctgatcgtcgcgggcgcctcggcgttcgcgctgaagatcgacttcgcgcgtatggcgcagatcgcgaagtcggtcggtgcgtacctgatggtggacatggcgcactacgctgggctgatcgcggcgggcgtgtatccgaacccggtgccgcacgctgatttcgtgacgacgaccacgcacaagagcctgcgcggcccgcgcggcggcgtgatcctgatgaaggcggagtacgagaagcagatcaactcggcgattttcccgggcatccagggcggcccgctgatgcacgtgatcgcggcgaaggcggtggcgttcaaggaagcgctgtcgccggagttcaaggcgtatcagcaaaaggtggtggagaacgcgcgcgtgctggccgagacgctggtgaaacgcgggctgcggatcgtgtcgggccgcacggaaagccacgtgatgctggtggacctgcgcgcgaagcacatcacgggcaaggcggcggaagcggcgctgggtgcggcgcacattacggtgaacaagaacgcgattccgaacgatccggaaaagccgttcgtgacgagtggcgtgcggctgggctcgccggcgatgacgacgcgcggcttcgggccggcggaagcggagcaggtgggcaacctgatcgcggacgtgctggagaacccggaagatgcggcgacgctcgagcgcgtgcgcgcgcaagtggccgagctgaccaagcgtttcccggtctatcgctga

SEQ ID NO: 10088 - protein, 431 aa, Burkholderia vietnamiensis G4
MYSAAPVNLYTLNGNRMFDRAQSTIANVDPEIFAAIEQENRRQEDHIELIASENYTSPAVMAAQGSQLTNKYAEGYPGKRYYGGCEYVDVVEQLAIDRVKQLFGAEAANVQPNSGSQANQGVFFAMLKPGDTIMGMSLAHGGHLTHGSPVNMSGKWFNVVSYGLNENEDIDYDAAEKLAQEHKPKLIVAGASAFALKIDFARMAQIAKSVGAYLMVDMAHYAGLIAAGVYPNPVPHADFVTTTTHKSLRGPRGGVILMKAEYEKQINSAIFPGIQGGPLMHVIAAKAVAFKEALSPEFKAYQQKVVENARVLAETLVKRGLRIVSGRTESHVMLVDLRAKHITGKAAEAALGAAHITVNKNAIPNDPEKPFVTSGVRLGSPAMTTRGFGPAEAEQVGNLIADVLENPEDAATLERVRAQVAELTKRFPVYR

SEQ ID NO: 10089 - DNA, 1239 bp, Geobacillus thermodenitrificans NG80-2
  CDS (1)..(1239): transl_table=11
atgaactacttgccacaacaagatccgcaagtgttcgccaccatcgaacaagagcggaaacggcagcatgcaaaaattgagctaatcgcctcagaaaactttgtcagccgcgccgtgatggaagcgcaagggtcggtgatgacgaacaagtatgcggaaggctacccaggtcgccgctattacggtggttgcgaatacgttgacgtagtcgaagatttggcgcgtgaacgggcgaagcaattgttcggagcagagcatgcgaacgtccaaccgcattccggagcacaggcgaacatggctgtctatttcaccgtcctcaagcccggcgatactgtgcttggcatgaacttgtcgcacggcgggcatttgacgcacggcagcccggtcaacttcagcggggttcagtacaactttgtcgaatacggcgtcgatccggaaacgcatgtcattgactatgatgatgtgcgcgagaaagcgcgccttcatcggccgaagctgattgtcgccggcgcaagtgcctatccgcgtgtcatcgattttgccaagttccgggaaatcgctgatgaagtcggcgcctatttaatggttgatatggcccatattgccggtcttgttgcggcaggtcttcatccgaatccagtgccgtatgcccattttgtcacgacgacgacgcataaaacattgcgcggcccgcgcggcggaatgattttatgccaagagcagtttgcgaaacaaatcgacaaatccattttccctggcattcaaggcggcccgcttatgcatgtcattgccgcgaaagcagtcgcacttggtgaggcgctgcaagatgactttaaagtatacgcaaagcgcatcatcgacaacgctcaacgccttgcagccgccttgcaaaaagaagggttcactcttgtttccggcggcacggacaaccatttgctgcttgttgacttgcgcccgcaacagctgacagggaaaacagcggagaaagtgttggatgaagtcggcattaccgtcaataaaaacacaattccgtatgatccagaaagcccgtttgtcacgagcggcatccgcatcggtacagccgcggttacgacgcgcggttttggtttggaagaaatggatgaaattgcttcccttatcggtcttgtgctgaaaaacatcgacaacgagcaggcgctcgaggaagcacgccaacgcgtcgttgccttaacggaaaaattcccgctctatcaagactaa

SEQ ID NO: 10090 - protein, 412 aa, Geobacillus thermodenitrificans NG80-2
MNYLPQQDPQVFATIEQERKRQHAKIELIASENFVSRAVMEAQGSVMTNKYAEGYPGRRYYGGCEYVDVVEDLARERAKQLFGAEHANVQPHSGAQANMAVYFTVLKPGDTVLGMNLSHGGHLTHGSPVNFSGVQYNFVEYGVDPETHVIDYDDVREKARLHRPKLIVAGASAYPRVIDFAKFREIADEVGAYLMVDMAHIAGLVAAGLHPNPVPYAHFVTTTTHKTLRGPRGGMILCQEQFAKQIDKSIFPGIQGGPLMHVIAAKAVALGEALQDDFKVYAKRIIDNAQRLAAALQKEGFTLVSGGTDNHLLLVDLRPQQLTGKTAEKVLDEVGITVNKNTIPYDPESPFVTSGIRIGTAAVTTRGFGLEEMDEIASLIGLVLKNIDNEQALEEARQRVVALTEKFPLYQD

SEQ ID NO: 10091 - DNA, 1326 bp, Chlorobium phaeovibrioides DSM 265
  CDS (1)..(1326): transl_table=11
atggacaccgatattctgaagatgcaggacagagaggtttttgaggcgatagcccttgagactggccgtcagatggaaacccttgagctcattgcctcggagaatttcaccagtcgcgcagtcatgcaggcctgcggttcggtgatgaccaataaatatgccgagggttatcccggcaagcgctactatggtggctgtgagtttgttgatatagccgagaatcttgcgcgcgaccgtgcaaaaaaacttttcggctgcgagtatgtcaatgttcagccgcactcaggttcaagcgcaaacatggcggtgcttttttctgtgctcaaacccggtgactgcatcatgggtctcgacctttcccatggcggccacctcacgcacggcagttcggtcaatttttccgggcagatgtacaaggcccatgcttacggagttgatggcgaaaccggtataattgatatgaaccaggtggagaaaatggcccttgaggttcgtccccgccttattatctgtggcgcaagtgcttattcccaggggtttgacttcaaggccttccgtgaaattgccgacaaagtcggggcattcctgatggccgatatcgcccatcctgcaggacttattgtcagtggcctgctcagcgatccgatgccgcattgccattttgtgaccaccaccacacacaagacccttcgtggtcctcgcggtggcatgatcatgatgggcaaagactttgaaaacccgatggggattaccatcaaaaccaaaaacgggcaacgggtgaagatgatgtcggaagtgatggacgcagaggtgatgcccggcattcagggcggtcctctcatgcacattattgccggcaaggctgttgctttcggcgaggctcttcgtccggagttccgtcagtatgcaatgcaggtgcgcagtaatgctgcagctatgtcggagcggttcctgagcctcggttacaacattgtgagcggcggaacgaagaaccatctgatgctgcttgatctccggaacaaggatattaccggcaaggttgtagagaacacattgcacgaagccggcataaccgtcaacaagaacatggttccttttgatgacaagtcgccattcgtgaccagtggcatccgtatcggtactgcagccatgacaacccgcggaatgaatgaagacgacagccggctgattgccgagctgattgacagggtcattctgtcagcggcttcaccggagtcctcctctgtatgccgcagcgtcaaggaggagattcgttcgctctgtctcagaaatccgcttgagggatatggtgtgacgccctcctga

SEQ ID NO: 10092 - protein, 441 aa, Chlorobium phaeovibrioides DSM 265
MDTDILKMQDREVFEAIALETGRQMETLELIASENFTSRAVMQACGSVMTNKYAEGYPGKRYYGGCEFVDIAENLARDRAKKLFGCEYVNVQPHSGSSANMAVLFSVLKPGDCIMGLDLSHGGHLTHGSSVNFSGQMYKAHAYGVDGETGIIDMNQVEKMALEVRPRLIICGASAYSQGFDFKAFREIADKVGAFLMADIAHPAGLIVSGLLSDPMPHCHFVTTTTHKTLRGPRGGMIMMGKDFENPMGITIKTKNGQRVKMMSEVMDAEVMPGIQGGPLMHIIAGKAVAFGEALRPEFRQYAMQVRSNAAAMSERFLSLGYNIVSGGTKNHLMLLDLRNKDITGKVVENTLHEAGITVNKNMVPFDDKSPFVTSGIRIGTAAMTTRGMNEDDSRLIAELIDRVILSAASPESSSVCRSVKEEIRSLCLRNPLEGYGVTPS

SEQ ID NO: 10093 - DNA, 1254 bp, Aeromonas salmonicida subsp. salmonicida A449
  CDS (1)..(1254): transl_table=11
atgttgaaacgtgacatgaccatcgccaattatgatccgcaattgtggcaggccatcacagacgagacccgtcgtcaggaagagcacatcgagctgatcgcgtctgagaactacaccagcccccgcgtcatggaagcccagggctcccagctgaccaacaagtacgctgaaggctatccggccaagcgctactacggtggttgcgagtacgtcgacgtggttgaaaccctggccatcgagcgcgccaaggaactgtttggtgccacttacgccaacgtgcagccgcattccggctcccaggccaacagtgccgtttacatggctctgctgcagccgggcgacaccgtgctgggcatgaacctggcccatggcggtcacctgacccacggctcccccgtcaacttctccggcaagctgtacaacatcattccttacggtatcgatgagtccggcaagattgactatgacgaaatggaacgtctggccgtcgagcacaagccgaagatgatgataggtggcttctccgcctactcaggtatcgttgactgggcccgcatgcgtgaaatcgccgacaagattggtgcctggctgttcgtcgacatggctcacgtagccggtctgattgccgctggtgtctacccgaacccggtgccccacgctcacgtggttacctccactacccacaagaccctggccggtccccgtggtggtctgatcctctccgccgctgacgacgaagatctgtacaagaagctgaactcagccgtcttcccgggcggccagggtggcccgctgatgcatgtcatcgccggtaaagcagtggcattcaaagaggcgctggagcccgagttcaagacctatcaggctcaagtcgtcaaaaacgccaaagccatggcggcgaccttcatcgagcgcggttacaagatcgtctcaggcggtaccgacaaccatctcatgctggttgatctgatcggccgtgagctgaccgggaaagaagccgatgccgctcttggcaaagccaacatcacagtcaacaagaactcggtgccgaacgacccgcgttccccgttcgtcacctcaggtgtgcggatcggtaccccggccatcacccgccgtggtttcaaggaagcagagtccatccatctgaccaactggatctgtgacgtgctggacaaccatgacaacgacgaagtgctggccaacacccgcgaaaaggtgctggatatctgccgtcgtttcccggtttatgcctga

SEQ ID NO: 10094 - protein, 417 aa, Aeromonas salmonicida subsp. salmonicida A449
MLKRDMTIANYDPQLWQAITDETRRQEEHIELIASENYTSPRVMEAQGSQLTNKYAEGYPAKRYYGGCEYVDVVETLAIERAKELFGATYANVQPHSGSQANSAVYMALLQPGDTVLGMNLAHGGHLTHGSPVNFSGKLYNIIPYGIDESGKIDYDEMERLAVEHKPKMMIGGFSAYSGIVDWARMREIADKIGAWLFVDMAHVAGLIAAGVYPNPVPHAHVVTSTTHKTLAGPRGGLILSAADDEDLYKKLNSAVFPGGQGGPLMHVIAGKAVAFKEALEPEFKTYQAQVVKNAKAMAATFIERGYKIVSGGTDNHLMLVDLIGRELTGKEADAALGKANITVNKNSVPNDPRSPFVTSGVRIGTPAITRRGFKEAESIHLTNWICDVLDNHDNDEVLANTREKVLDICRRFPVYA

SEQ ID NO: 10095 - DNA, 1245 bp, Polynucleobacter necessarius subsp. asymbioticus QLW-P1DMWA-1
  CDS (1)..(1245): transl_table=11
atgtttgaccgtcaaaacacccttgccaaaaccgacccgcaactctgggcagctattcagaacgaaaacaagcgtcaagaagaccatattgagctgattgcttctgaaaactatacttctccagctgtcatggaagcccaaggctcccaattgaccaataagtacgctgaaggttatccgggcaagcgttattacggtggctgtgaatttgtcgacgtagctgagcaattagcaattgatcgcgttaaagcattgtttggtgctgaggcggccaacgttcaacctcattgcggagcatctgctaaccaagcggtgttcttggctttcttaaaacctggcgatacttttatgggtatgagcttggctgaaggcggtcacttgactcatggtatggctctgaatatgagtggtaagtggttcaacccaattgcttatggcttagataaaaatgaagaaattgattacgagcaaatggagcgtttagctcgtgagcacaaaccaaaattgattattgctggtgcatctgcttactctaaaaaaattgattttgagcgcattggtaagttggctaaagaagtgggcgcaatctttatggtggacatggctcactatgctggtctagttgctgcaggcgtttatccaaacccagtgccacatgctgacatcgtcacatcgactactcacaagagtttgcgcggccctcgtggcggcatcatcttgatgaaggctgagcatgagaaagccattaactctgcagtcttcccaggcttgcagggcgggcctttgatgcatgtgattgcgggtaaagcggcagcatttaaagaagcagcagagcctggttttaaagattaccaaaagcaagttgtagcgaatgccaaagcattggctgagacattaattgctcgcggcctgcgcattgtttcaggtggtactgactctcacgtgatgctcgttgatctgcgtgctaagaaaatgactggtaaagaagcggaacatgttttgggtgaagcgcatatcacttgtaacaagaatggcattccgaatgatccagaaaaaccaatggtgactagtggtattcgtttagggtcaccagcaatgactacgcgtggttttaaagaagctgaagcagttcaagtgggcaacttcattgctgatgttttagataacccaaatgatccagagaatattgctaaggtacgcgctcaagttgctgagttaacgaagcgcttcccggtttacggttaa

SEQ ID NO: 10096 - protein, 414 aa, Polynucleobacter necessarius subsp. asymbioticus QLW-P1DMWA-1
MFDRQNTLAKTDPQLWAAIQNENKRQEDHIELIASENYTSPAVMEAQGSQLTNKYAEGYPGKRYYGGCEFVDVAEQLAIDRVKALFGAEAANVQPHCGASANQAVFLAFLKPGDTFMGMSLAEGGHLTHGMALNMSGKWFNPIAYGLDKNEEIDYEQMERLAREHKPKLIIAGASAYSKKIDFERIGKLAKEVGAIFMVDMAHYAGLVAAGVYPNPVPHADIVTSTTHKSLRGPRGGIILMKAEHEKAINSAVFPGLQGGPLMHVIAGKAAAFKEAAEPGFKDYQKQVVANAKALAETLIARGLRIVSGGTDSHVMLVDLRAKKMTGKEAEHVLGEAHITCNKNGIPNDPEKPMVTSGIRLGSPAMTTRGFKEAEAVQVGNFIADVLDNPNDPENIAKVRAQVAELTKRFPVYG

SEQ ID NO: 10097 - DNA, 1296 bp, Rhodobacter sphaeroides ATCC 17025
  CDS (1)..(1296): transl_table=11
atgaacgccccgcaccgcgacgacggcttctttaccgaaagcctgtcctcccgtgaccccgagcttttcgcctcgatcaccggcgagcttggccggcagcgcgacgagatcgaactgatcgcctcggagaacatcgtgagccgcgccgtgatggaggcgcagggctcggtcatgaccaacaagtacgccgagggctacccgggcaagcgctactatggcggctgcgactacgtggacgtcgccgagacgctggccatcgagcgggcgaagcagctctttggctgcgcctttgccaacgtccagcccaactcgggcagccaggccaaccagggcgtgttccaggcgctgatcaagccgggcgacacgatcctcgggatggagctggcctcgggcgggcacctgacgcatggggcggcgccgaaccagtcgggcaagtggttccatgcggtccagtatggcgtgcgccagcaggaccagcggatcgactacgatcaggtcgcggcgctggcccgcgagcacaagccccggctcatcatcgccggcggctcggccatcccgcgccagatcgactttgcgaagttccgcgccattgccgatgaagtcggcgcctggctgatggtggacatggcgcatttcgcgggcctcgtcgcgggcggcgcgcatccctcgcccttcccctacgccgatgtggccaccaccacgacgcacaagaccctgcgcggcccgcgcggcggcatgatcctcacgaacaacgaggagatcgcgaagaaggtcaattcggcgatcttccccggcatccagggcggcccgctgatgcatgtgatcgccgcgaaggccgtggccttcggcgaggcgctgcggcccgagttcaaggcctacgccgcgcaggtcgtgaagaacgcgcaggcgctggcggacgagctgatgaagggcgggctcgacatcgtgacgggcggcactgacacccatgtgatgctcgtggacctgcgcccgaagggcgtgaagggcaacgcgaccgaaaaggcgctgggccgcgcgcacatcacctgcaacaagaacggcatcccgttcgaccccgagaagccgatggtgacctcgggcgtgcgtctcggcacgccggccggcaccacccgcggcttcggcgaggaggagttccgcgagatcggccgcctgatcgtcgaggtggtggacgggctcgccgcccatggcgaagagggcaatgccgcggtcgaggaggccgtcaaggccaaggttgcggcgctctgcgcccgcttcccgctctacccgacgctctga

SEQ ID NO: 10098 - protein, 431 aa, Rhodobacter sphaeroides ATCC 17025
MNAPHRDDGFFTESLSSRDPELFASITGELGRQRDEIELIASENIVSRAVMEAQGSVMTNKYAEGYPGKRYYGGCDYVDVAETLAIERAKQLFGCAFANVQPNSGSQANQGVFQALIKPGDTILGMELASGGHLTHGAAPNQSGKWFHAVQYGVRQQDQRIDYDQVAALAREHKPRLIIAGGSAIPRQIDFAKFRAIADEVGAWLMVDMAHFAGLVAGGAHPSPFPYADVATTTTHKTLRGPRGGMILTNNEEIAKKVNSAIFPGIQGGPLMHVIAAKAVAFGEALRPEFKAYAAQVVKNAQALADELMKGGLDIVTGGTDTHVMLVDLRPKGVKGNATEKALGRAHITCNKNGIPFDPEKPMVTSGVRLGTPAGTTRGFGEEEFREIGRLIVEVVDGLAAHGEEGNAAVEEAVKAKVAALCARFPLYPTL

SEQ ID NO: 10099 - DNA, 1254 bp, Pseudomonas stutzeri A1501
  CDS (1)..(1254): transl_table=11
atgttcagccgtgatttgaccctcgcccgtttcgacgccgatctcttcgctgccatgcagcaggaagccaagcgtcaggaagaccacatcgagctgatcgcctcggagaactacaccagcccggcggtgatggaagcccagggttcggtgctgaccaacaagtacgccgaaggctacccgggcaagcgctactacggcggttgcgagtacgtcgacgtggtcgagcagctggccatcgatcgcgccaaggagctgttcggcgccgactacgccaacgtccagccgcacgccggctcccaggccaacgccgcggtctacctggccctgctcagtgcgggcgacaccatcctcggcatgagcctggcccacggtggtcacctgacccacggtgcgtccgtttcgtcttccggcaagctgtacaacgccgtgcagtacggcatcaatgatcaaggcctgatcgactacgacgaggtcgagcgcctggccgtcgagcacaagccgaagatgatcgtcgccggtttctcggcctattcccagaagctggactttgcccgcttccgcgagatcgccgacaaggtcggtgcctatctcttcgtcgacatggctcacgtggccggtctggtcgccgccggcgtctacccgaacccggtgcccttcgccgacgtggtcaccaccactacccacaagaccctgcgcggcccgcgcggcggcctgatcctggccaagaagaacgaggagatcgagaagaagctcaactccgcagtcttcccgggcgcccagggcggcccgctggagcacgtgatcgcggccaaggcggtgtgcttcaaggaagccctgcagcccgagttcaaggcttaccagcagcaggtagtgaaaaacgcccaggccatggccgaagtattcatccagcgcggtttcgacgtggtttccggcggcacccagaaccacctgttcctgctctcgctgatcaagcaggacatcactggcaaggacgcggacgccgccctgggtcgcgcccacatcaccgtgaacaagaacagcgtgccgaacgatccgcgttcgccgttcgtcacttccggtctgcgtatcggtacgccggccgtcaccacccgcggtttcggcgaggccgagtgccgcgagctggccggctggatctgcgacatcctcgataacatgggcgacgagtcggtgatcgacgcggtccgtggcaaggtcgaggcggtctgcgccaagttcccggtgtacggcaactaa

SEQ ID NO: 10100 - protein, 417 aa, Pseudomonas stutzeri A1501
MFSRDLTLARFDADLFAAMQQEAKRQEDHIELIASENYTSPAVMEAQGSVLTNKYAEGYPGKRYYGGCEYVDVVEQLAIDRAKELFGADYANVQPHAGSQANAAVYLALLSAGDTILGMSLAHGGHLTHGASVSSSGKLYNAVQYGINDQGLIDYDEVERLAVEHKPKMIVAGFSAYSQKLDFARFREIADKVGAYLFVDMAHVAGLVAAGVYPNPVPFADVVTTTTHKTLRGPRGGLILAKKNEEIEKKLNSAVFPGAQGGPLEHVIAAKAVCFKEALQPEFKAYQQQVVKNAQAMAEVFIQRGFDVVSGGTQNHLFLLSLIKQDITGKDADAALGRAHITVNKNSVPNDPRSPFVTSGLRIGTPAVTTRGFGEAECRELAGWICDILDNMGDESVIDAVRGKVEAVCAKFPVYGN

SEQ ID NO: 10101 - DNA, 1254 bp, Enterobacter sp. 638
  CDS (1)..(1254): transl_table=11
atgttaaagcgtgaaatgaacattgccgattatgatgcagaactgtggcaagcaatggagcaggaaaaagtacgtcaggaagagcacatcgaactgatcgcctccgaaaactacaccagcccgcgcgttatgcaggctcagggttctcagctgaccaacaaatacgctgaaggttatccaggcaaacgctactacggcggttgcgagtacgttgatatcgttgagcagttggcgatcgaccgtgcaaaagagctgtttggcgcagattacgctaacgtgcagccgcactccggttctcaggctaactttgcggtttacactgcgctgctgcaaccgggtgataccgtgctgggtatgaaccttgcacaaggcggtcacctgactcacggctcaccggttaacttctcaggcaaactgtacaacatcattccttacggcattgatgagtccggtaaaattgactacgaagacatggcgaagcaggctgagacccacaaaccgaagatgattatcggtggcttctctgcttactctggcgtggttgactgggcaaaaatgcgtgaaatcgcagacagcatcggcgcatacctgttcgtcgacatggcgcacgtcgcgggtctgattgcggcaggcgtttacccgaacccggttccacatgctcacgttgtgacgacgaccacccataaaaccctggcgggtccgcgtggcggcctgatcctggcacatggcggtaacgaagagctgtacaaaaaactcaactctgctgtgttcccaagcgctcagggcggcccgctgatgcacgtgatcgcggccaaagccgtggcgctgaaagaagcgatggagccagagtttaaagtgtatcagcagcaggttgcgaaaaacgccaaagccatggtggaagtcttcctgaaccgtggttacaaagtggtttccggcggtactgaaaaccacctgttcctgctggatctggttgataaaaacctgaccggtaaagaagctgacgccgccctgggccgcgcgaacatcaccgtgaacaaaaacagcgtaccaaacgatccgaaaagcccgtttgtgacttccggtatccgtatcggttctccggctgtgactcgccgcggcttcaaagaagctgaagtgaaagagctggctggctggatgtgtgatgttctggataacatcaacgacgaagcggtgatcgaacgtatcaaaggtaaagtgctggatatctgcgcgcgtttccctgtgtacgcctaa

SEQ ID NO: 10102 - protein, 417 aa, Enterobacter sp. 638
MLKREMNIADYDAELWQAMEQEKVRQEEHIELIASENYTSPRVMQAQGSQLTNKYAEGYPGKRYYGGCEYVDIVEQLAIDRAKELFGADYANVQPHSGSQANFAVYTALLQPGDTVLGMNLAQGGHLTHGSPVNFSGKLYNIIPYGIDESGKIDYEDMAKQAETHKPKMIIGGFSAYSGVVDWAKMREIADSIGAYLFVDMAHVAGLIAAGVYPNPVPHAHVVTTTTHKTLAGPRGGLILAHGGNEELYKKLNSAVFPSAQGGPLMHVIAAKAVALKEAMEPEFKVYQQQVAKNAKAMVEVFLNRGYKVVSGGTENHLFLLDLVDKNLTGKEADAALGRANITVNKNSVPNDPKSPFVTSGIRIGSPAVTRRGFKEAEVKELAGWMCDVLDNINDEAVIERIKGKVLDICARFPVYA

SEQ ID NO: 10103 - DNA, 1254 bp, Caldicellulosiruptor saccharolyticus DSM 8903
  CDS (1)..(1254): transl_table=11
atgcaaatgtatttctataatttagtaaaggatactgaccctgaaatagctgaggcaataaaaaatgagctaaaaaggcagcaaaacaagattgaactcattgcctctgaaaactttgtgtcaattgctgttatggcagcaatgggctcgcccttgacaaataaatatgcagaaggttatcctaacaaaagatattacggtggctgcgagtatattgatgttgttgagtcaattgccattgagagagcaaaaaagctatttggagcagagcatgcaaatgttcagccacactctggtgctcaggcaaatatggcagtgtattttgctgtgctgaatcctggggatactatattgggaatgaatctttcgcatggtggtcatttgactcatggtagtcctgtgaacttttctggaaaactttataatatcgtatcgtatggtgttgatcctgaaacagaaacaatagactatgacgaggttttaagattagcaaaagaacacagacccaaactaattttagctggtgcctcagcatatccaagaattattgactttaagaagttcagagaaatagctgatgaggttggagcatatttgatggtcgacatggcacacattgcaggcttggttgcagcaggacttcatccatcacctgttgaatatgccgattttgttaccacaacaacgcacaagacacttagaggtcctcgaggggggttaatcctctgtaaggagaaatatgcaaagctgattgacaagtctatattccccggtattcaaggggggcctttagaacatgtaattgcagcaaaagcagttgctttaaaagaggcaatgacagaagagtttagaaattatcaaattcagattttaaagaatgctaaggcactcagtgaaagactgattgaaagaggatttagacttgttagtggtggtacggataatcatttgatgcttgttgatttgcgaaacaaaggtattactggcaaagatgcagaaaaaagacttgacagcttgaatataacatgtaataaaaatgcaattccttttgatactcaaagcccaatggtgacaagtggaataaggcttggtactccagctgtgacaacacgtgggtttaaagaagaagacatgatagaagttgctgatatcattcatgatgctctgacaaattctgatacggatgataacatattgcaaagggttaaggctttgtgtgagaagtatccactttatagcgaatttagagagtaa

SEQ ID NO: 10104 - protein, 417 aa, Caldicellulosiruptor saccharolyticus DSM 8903
MQMYFYNLVKDTDPEIAEAIKNELKRQQNKIELIASENFVSIAVMAAMGSPLTNKYAEGYPNKRYYGGCEYIDVVESIAIERAKKLFGAEHANVQPHSGAQANMAVYFAVLNPGDTILGMNLSHGGHLTHGSPVNFSGKLYNIVSYGVDPETETIDYDEVLRLAKEHRPKLILAGASAYPRIIDFKKFREIADEVGAYLMVDMAHIAGLVAAGLHPSPVEYADFVTTTTHKTLRGPRGGLILCKEKYAKLIDKSIFPGIQGGPLEHVIAAKAVALKEAMTEEFRNYQIQILKNAKALSERLIERGFRLVSGGTDNHLMLVDLRNKGITGKDAEKRLDSLNITCNKNAIPFDTQSPMVTSGIRLGTPAVTTRGFKEEDMIEVADIIHDALTNSDTDDNILQRVKALCEKYPLYSEFRE

SEQ ID NO: 10105 - DNA, 1254 bp, Pseudomonas mendocina ymp
  CDS (1)..(1254): transl_table=11
atgttcagccgtgatttgaacctcgctcgttttgacgccgaactctttgccgcaatggagcaggaagcccagcgccaggaagaacacatcgagctgatcgcctcggaaaactacaccagcccggcggtgatggaagcccagggcagcgtgctgaccaacaagtacgccgaaggctacccgggcaagcgctactacggcggctgcgaatacgtcgacgtggtcgagcagctggccatcgaccgggccaaggagctgttcggcgccgattacgccaacgtccagccgcactccggctcgcaggccaacagcgctgtgtacatggccctgctcaacgccggcgacaccgtcctgggcatgagcctggcccacggcggccacctgactcacggcgccagcgtcagcttctccggcaagatctacaacgccgtgcagtacggcatcaacgaccagggcctgatcgactacgacgaagtcgagcgtctggccgtggagcacaagccgaagatgatcatcgccggcttcagcgcctattcgcaggtgctggatttcccgcgtttccgcgccatcgccgacaaggtcggtgcctacctgttcgtcgacatggcccacgttgccggtctggtcgccgccggcctgtacccgaacccggtgccgttcgccgacgtggtcaccaccaccacgcacaagaccctgcgcggcccgcgtggcggcctgatcctcgcgcgcaagaacgaagagctggagaagaagttcaactccgcggtgttcccgggcggccagggcggcccgctggagcacgtcatcgccgccaaggcggtgtgcttcaaggaagccctgcagcccgagttcaaggcctaccaggcccaggtgatcaagaacgcccagaccatggcccaggtgttcatcgacaacggctacgacgtggtttccggcggcacccagaaccacctgttcctgctctcgctgatcaagcaggacatcaccggtaaggacgccgacgccgccctgggtcgcgcctacatcacggtgaacaagaacagcgtaccgaacgacccgcgctcgccgttcgtcacctccggtctgcgtatcggcacccctgccgtgaccactcgcggcttcaaggaagacgagtgccgtcagctggccggctggatctgcgaagtgctggccaacatcggcaacgacgaagtcgaaggccgcgtgcgcgagcaggtcaaggctctgtgcgccaagttcccggtgtacggcaactaa

SEQ ID NO: 10106 - protein, 417 aa, Pseudomonas mendocina ymp
MFSRDLNLARFDAELFAAMEQEAQRQEEHIELIASENYTSPAVMEAQGSVLTNKYAEGYPGKRYYGGCEYVDVVEQLAIDRAKELFGADYANVQPHSGSQANSAVYMALLNAGDTVLGMSLAHGGHLTHGASVSFSGKIYNAVQYGINDQGLIDYDEVERLAVEHKPKMIIAGFSAYSQVLDFPRFRAIADKVGAYLFVDMAHVAGLVAAGLYPNPVPFADVVTTTTHKTLRGPRGGLILARKNEELEKKFNSAVFPGGQGGPLEHVIAAKAVCFKEALQPEFKAYQAQVIKNAQTMAQVFIDNGYDVVSGGTQNHLFLLSLIKQDITGKDADAALGRAYITVNKNSVPNDPRSPFVTSGLRIGTPAVTTRGFKEDECRQLAGWICEVLANIGNDEVEGRVREQVKALCAKFPVYGN

SEQ ID NO: 10107 - DNA, 1254 bp, Pseudomonas mendocina ymp
  CDS (1)..(1254): transl_table=11
atgttcagcaagcacgaccaactgcaaggctatgacgacgccctgctcgcggcgatccaggccgaagaacagcgccaggaagaccacatcgagctgatcgcatcggagaactactgcagccagcgcgtgatgcaggcgcaaggcagcggcctgaccaacaagtacgccgaaggctatccgggcaagcgctactacggtggctgcgagcatgtggacaaggtcgaggcgctggccatcgagcgcgccaagcaactgttcggtgccgactacgccaacgtgcagccgcactcgggctcctccgccaacagcgccgtttacctggcgttgctcaatgccggcgataccatcctaggcatgagcctggcccatggcggccacctgactcacggcgccaaggtgtcgtcctcgggcaagctgtacaacgccgtgcagtacggcatcgacgagaacggcctgatcgactacgacgaggtcgagcgcctggccgtcgagcacaagccgaagatgatcgtcgccggtttctcggcctactcgcgcgtgctggacttcccgcgtttccgcgccatcgccgacaaggtcggggcgctgctgttcgtcgacatggcccatgtggcggggctcgtggccgccggtctgtaccccaacccggtgccgttcgccgacgtggtcaccaccaccacgcacaagaccctgcgcggcccgcgtggcggcctgatcctggcgcggggcaacgaagagatcgagaagaagctcaactccgccgtattcccaggcgcccagggcggcccgctgatgcacgtcatcgcggccaaggcggtgtgcttcaaggaggcgctggagccgggcttcaaggcctaccagcagcaggtgatcgacaacgcccgcgccatggccgaagtgttcgtcgagcgcggctatgacgtggtctccggcggcaccgacaaccacctgatgctgatcagcctggtcaagcagggcctgaccggcaaggcggccgacgcggcgctgggcgatgcccacatcacggtgaacaagaacgccgtgcccaacgacccgcagtcgccgttcgtcacctccggcatccgcatcggtaccccggcggtgaccacccgcggcttcaaggaaggcgaatgccgcaccctggccggctggatctgcgacatcctcgacgacctggacaacccggccgtgatcgagcgcgtgcgcagccaggtcgcagacctgtgcgccaccttcccggtctacgctgactga

SEQ ID NO: 10108 - protein, 417 aa, Pseudomonas mendocina ymp
MFSKHDQLQGYDDALLAAIQAEEQRQEDHIELIASENYCSQRVMQAQGSGLTNKYAEGYPGKRYYGGCEHVDKVEALAIERAKQLFGADYANVQPHSGSSANSAVYLALLNAGDTILGMSLAHGGHLTHGAKVSSSGKLYNAVQYGIDENGLIDYDEVERLAVEHKPKMIVAGFSAYSRVLDFPRFRAIADKVGALLFVDMAHVAGLVAAGLYPNPVPFADVVTTTTHKTLRGPRGGLILARGNEEIEKKLNSAVFPGAQGGPLMHVIAAKAVCFKEALEPGFKAYQQQVIDNARAMAEVFVERGYDVVSGGTDNHLMLISLVKQGLTGKAADAALGDAHITVNKNAVPNDPQSPFVTSGIRIGTPAVTTRGFKEGECRTLAGWICDILDDLDNPAVIERVRSQVADLCATFPVYAD

SEQ ID NO: 10109 - DNA, 1254 bp, Pseudomonas mendocina ymp
  CDS (1)..(1254): transl_table=11
atgttcagcaagcaagatcagattcagggttacgacgacgagttgctcgcggcgatcgatcaggaagaacgccgtcaggaagagcacatcgagctgatcgcctcggaaaactactgcagccagcgcgtgatggaagcgcagggcagcggcctgaccaacaagtacgccgagggctacccgggcaagcgctactacggtggctgcgagtatgtcgacaaggtcgagcagctcgccatcgatcgtgccaagcagctgttcggcgccgacttcgccaacgttcaaccgcattccggttcctcggccaacagcgccgtgtacctggcgctgctcaatgccggcgacaccatcctcggcatgagcctggcccacggcggccacctgacccacggcgccaaggtgtcgtcttcgggcaagctgtacaacgccgtgcagtacgggctgaaccccgccaccggcctgatcgactacgacgaggtcgagcgcctggccgtggagcacaagccgaagatgatcgtggccggcttctccgcctattccaagaccctggatttcccgcgctttcgcgccatcgccgacaaggtcggtgcactcctgttcgtcgacatggcgcacgtcgccggcctggttgccgctggcctgtatccgaacccgattcccttcgccgatgtggtcaccaccaccacccacaagaccctgcgtggtccgcgcggcggcctgatcctggccaaggccaacgaagagatcgagaagaaactcaactccgccgtgttccccggcgctcagggcggcccgctgatgcacgtgatcgcagccaaggcggtgtgcttcaaggaggccatggagcccgagttcaaggcttaccagcagcaggtcatcgacaacgcccaggccatggccaaggtcttcatcgagcgcggctacgaggtggtgtccggtggcaccgacaaccacctgttcctgctcagcctgatcaagcagggcctgaccggcaaggaggccgacgccgcgctcggtcgtgccggcatcaccgtgaacaagaacgccgtgccgaacgacccgcagtcgccgttcgtgacctcgggcatccgcatcggtaccccggcggtgaccacccgcggcttcaaggtcgcccagtgtcaggcgctggccggttggatctgcgacatcctcgaccacctcggcgatgccgatgtcgaggcgcaggtggccaagctggtggccgggttgtgcgcggactacccggtgtatcgctaa

SEQ ID NO: 10110 - protein, 417 aa, Pseudomonas mendocina ymp
MFSKQDQIQGYDDELLAAIDQEERRQEEHIELIASENYCSQRVMEAQGSGLTNKYAEGYPGKRYYGGCEYVDKVEQLAIDRAKQLFGADFANVQPHSGSSANSAVYLALLNAGDTILGMSLAHGGHLTHGAKVSSSGKLYNAVQYGLNPATGLIDYDEVERLAVEHKPKMIVAGFSAYSKTLDFPRFRAIADKVGALLFVDMAHVAGLVAAGLYPNPIPFADVVTTTTHKTLRGPRGGLILAKANEEIEKKLNSAVFPGAQGGPLMHVIAAKAVCFKEAMEPEFKAYQQQVIDNAQAMAKVFIERGYEVVSGGTDNHLFLLSLIKQGLTGKEADAALGRAGITVNKNAVPNDPQSPFVTSGIRIGTPAVTTRGFKVAQCQALAGWICDILDHLGDADVEAQVAKLVAGLCADYPVYR

SEQ ID NO: 10111 - DNA, 1254 bp, Dichelobacter nodosus VCS1703A
  CDS (1)..(1254): transl_table=11
atgtttacaaaagcaatgaacatcgctgattttgataatgaattagcccaagcaatcgctgatgaagccactcgtcaggaagatcatattgaattgatcgcttctgaaaactattgcagtccgcgcgtcatggaagcacaaggcagttgtttaaccaataaatatgccgaaggttatccgcggaaacgttattatggtggctgtgaatacgttgatatcgttgaagaattagcaattgcgcgcgttaaaatgttatttgctgctgattatgccaacgtacaaccccacagcggttctcaagccaatgctgccgtatttttagctttattagaaccaggtgataccgttttaggtatggatttggatcacggcggacatttaacccacggttcaaaagtcagcttttctggaaaaacttataattccatcggctacggcattgatgataaaggcttaattgattatgacgctgtggcgcaattagccgaaaaacatcgtcctaaaatgattattgccggcttttctgcttattcacaagttcttgatttccaacggttccgcgaaattgccgacagcgttggcgcttatttaatggtcgatatggcgcacgttgctggattagtagcagcaggtttatatcccaatcctgttcctttcgctgatgtggtcacttcaaccacgcataaaacattgcgcggcccgcgcggcggcatcattttagccaaagccaatcccaccattgaaaagaaattaaattctgccattttcccaggatctcaaggtggcccgttaatgcatgtgattgcggcaaaagccgttgcgtttaaagaagcgctggaaccgtctttccaaaaatatcaagaacaagttgtggaaaacgcgaaaaccatggcaaaagtatttatcgcgcgcggttacgatatcgtctccggcggcacgcaaaaccacttaatgctggtgagtttgatcaataaaggattaaccggtaaagcggcaaacgatgcattatctcgcgctcatattacggtaaacaaaaactccgtgcccaacgatccgcaatcgcctttcgtcaccagcggaatccgcattggtacaccggcaattaccacacgcggttttggcgttaatgaagtgaaaaaagttgccaactggatttgcgacgttttagatgacattgacaatgaagaagtcattcttaacgtgcgcaataaagtagcggaattgtgcgctgaatttccagtttatggtcaataa

SEQ ID NO: 10112 - protein, 417 aa, Dichelobacter nodosus VCS1703A
MFTKAMNIADFDNELAQAIADEATRQEDHIELIASENYCSPRVMEAQGSCLTNKYAEGYPRKRYYGGCEYVDIVEELAIARVKMLFAADYANVQPHSGSQANAAVFLALLEPGDTVLGMDLDHGGHLTHGSKVSFSGKTYNSIGYGIDDKGLIDYDAVAQLAEKHRPKMIIAGFSAYSQVLDFQRFREIADSVGAYLMVDMAHVAGLVAAGLYPNPVPFADVVTSTTHKTLRGPRGGIILAKANPTIEKKLNSAIFPGSQGGPLMHVIAAKAVAFKEALEPSFQKYQEQVVENAKTMAKVFIARGYDIVSGGTQNHLMLVSLINKGLTGKAANDALSRAHITVNKNSVPNDPQSPFVTSGIRIGTPAITTRGFGVNEVKKVANWICDVLDDIDNEEVILNVRNKVAELCAEFPVYGQ

SEQ ID NO: 10113 - DNA, 1248 bp, Pelotomaculum thermopropionicum SI
  CDS (1)..(1248): transl_table=11
atgagtttaaagcgccctctgtccgaagtcgacccggaaattttccgggccatcgagctggaaacccagagacagcgcaatactttggaactgattgcttcagaaaacgtagccagccgggccgtaatggaggcccagggctcggtgctgaccaacaaatatgcggagggctatccggggcgccgctattacgggggctgcgagtttgtggacattgccgaggatctggccatttcccgcgccaaggagcttttcggggcgggttttgcaaacgtgcagccgcattcaggggcccaggccaataccgccgtctattttgccctgctaaacccgggggataccataatgggtatggatcttgcccacggcgggcacctcacccacggaagcccggttaacatttccggcaggtatttcaagtttacgttttacggtgtggaaaaagaaaccggcaggatcaactacgaaaaaatgttttccattgcctttgagcacaagccgcggatgattgtggccggcgccagcgcctatccccgcgccatagacttttacaagatcaaagagatcgccgcagaagttggcgcctacctgatggtcgacatggcccacattgccgggctggtggcggccgggttgcacatgagcccggtgccttacgcagacgtggtcaccaccaccacccataagactctgcgcggtcccaggggcggcctgatcctgtgcaaggacgccgaaagatacggcacaaagataaacagggcggtctttccgggcgtccagggagggccgctgatgcacgttattgcggccaaggcggtagcctttaaagaggcaatggagcccggctttaaagagtaccagcgcaaaattgtaagcaacgcccgggcgctggcggacgccctgctggagcggggctttgagctggtttccgggggtaccgacaaccacctgatcctggttgacttaaggagcaagaaaattaccggcagggaagcccaggagttgttcgacgcggtgggcgtcacggtaaacaagaacgccgtccccttcgacccgcagccgcccaacatagccagcggcatccggatcggcacgcccgccgtaacttcgcggggcctgaatgaggatgacatggtgcaaattgccgaaataatggattatgctatcgaacaccgcgacgaccgcggcaagctggaaaaggccagggcgaaggtagacgaaatatgcgcccggtacccgctatactga

SEQ ID NO: 10114 - protein, 415 aa, Pelotomaculum thermopropionicum SI
MSLKRPLSEVDPEIFRAIELETQRQRNTLELIASENVASRAVMEAQGSVLTNKYAEGYPGRRYYGGCEFVDIAEDLAISRAKELFGAGFANVQPHSGAQANTAVYFALLNPGDTIMGMDLAHGGHLTHGSPVNISGRYFKFTFYGVEKETGRINYEKMFSIAFEHKPRMIVAGASAYPRAIDFYKIKEIAAEVGAYLMVDMAHIAGLVAAGLHMSPVPYADVVTTTTHKTLRGPRGGLILCKDAERYGTKINRAVFPGVQGGPLMHVIAAKAVAFKEAMEPGFKEYQRKIVSNARALADALLERGFELVSGGTDNHLILVDLRSKKITGREAQELFDAVGVTVNKNAVPFDPQPPNIASGIRIGTPAVTSRGLNEDDMVQIAEIMDYAIEHRDDRGKLEKARAKVDEICARYPLY

SEQ ID NO: 10115 - DNA, 1308 bp, Vibrio cholerae O395
  CDS (1)..(1308): transl_table=11
atggagtcattgtgtggtttttttgcaatttcagtcaatctgagtcaggagatacagatgcttaagcgtgatatgaacatcgctgattacgatccggagctatacgctgccattcaggaagagacgcttcgtcaagaagaacatattgaacttattgcttcagaaaactacaccagcccgcgtgtaatgcaagcacaaggttctcaactgaccaacaagtacgccgaaggttatccaggtaagcgttactatggtggttgtgagtacgtggacaaagcagaagctttagcgattgatcgtgcttgccaactgtttggctgtgaatacgcgaacgttcagccgcactctggatctcaagcgaacagcgctgtgtacatggcgctgctcaacccaagtgacaccgtgctaggtatgagccttgctcacggtggtcatttgactcacggttcaccggttaacttctcgggcaagcactacaatgtgatcccttacggtatcgatgaagcgggtcaaattaactacgatgaaatggaagccttagcactggagcataagccaaagatgatcatcggtggcttctcggcttactcacaaatcgtggattggaaacgcatgcgtgaaattgccgataaagtgggtgcttacctgtttgttgacatggcgcacgttgcgggtctgattgcggcgggtgtttacccaagcccagtgccttttgcacacgttgtcacgaccaccacgcataaaacactggcaggtccacgcggtggcttgatcttgtcaaatgccggtgaggagatgtacaagaagctgaactctgcagtattccctggcggccaaggcggtcctttgatgcacgtgattgcggcaaaagcggtggcgttcaaagaagcgatggagcctgagtttaaagagtatcaagcgcgtgtggtgaaaaacgccaaagccatggtggcgcagttccaagagcgtggttacaagatcgtctctaacagcacggaaaaccatttgttccttgttgatctgattgataaaaacatcacaggtaaagaagcagatgccgctctgggcgctgccaatatcacggttaacaagaactcggtaccaaatgacccacgcagcccgtttgtgacttcaggtatccgtgtcggtacacctgcaatcactcgccgtggttttactgagcaagacgcaaaagatctcgccaactggatgtgtgatgttctagacaacatcaatgatcaaggtgtgattgaagcgacgaaacaaaaagtattggcgatctgtcaacgtctgcctgtttacgcttaa

SEQ ID NO: 10116 - protein, 435 aa, Vibrio cholerae O395
MESLCGFFAISVNLSQEIQMLKRDMNIADYDPELYAAIQEETLRQEEHIELIASENYTSPRVMQAQGSQLTNKYAEGYPGKRYYGGCEYVDKAEALAIDRACQLFGCEYANVQPHSGSQANSAVYMALLNPSDTVLGMSLAHGGHLTHGSPVNFSGKHYNVIPYGIDEAGQINYDEMEALALEHKPKMIIGGFSAYSQIVDWKRMREIADKVGAYLFVDMAHVAGLIAAGVYPSPVPFAHVVTTTTHKTLAGPRGGLILSNAGEEMYKKLNSAVFPGGQGGPLMHVIAAKAVAFKEAMEPEFKEYQARVVKNAKAMVAQFQERGYKIVSNSTENHLFLVDLIDKNITGKEADAALGAANITVNKNSVPNDPRSPFVTSGIRVGTPAITRRGFTEQDAKDLANWMCDVLDNINDQGVIEATKQKVLAICQRLPVYA

SEQ ID NO: 10117 - DNA, 1260 bp, Candidatus Vesicomyosocius okutanii HA
  CDS (1)..(1260): transl_table=11
atgtttgataaatctcaaacattagctaaagtagatgctgaaatctataaagcgattgttctggaagagactcgacaagagacacatattgagttgattgccagtgaaaattatacttcacctgcagtgatggagacgcaaggttcaaaattaaccaataagtatgctgaagggtatccttgtaagcgttattatggggggtgtgaatatgttgacatggttgagcaattagcgattgatcgtgctaaaacattatttggtgcggattatgcgaatgtccaaccacattctggttctcaggcgaatgctgcggtttttcaagcgttgttagtacctggggatacaattttaggcatgagtttagcacatggcggacatttaacacatggtgctacaccttcgttttcgggtaaaaattttaattctattcaatatggtttgaatcaaaaaacgggggagattgattatgagcaagttgaagttttggcaaaaaggtataagcctaaaatgattattgctggtttttcagcatattcacgtatggttgattggcaacgttttagagaaattgcagatagtgttggtgcttatttaatggttgatatggcgcatgttgctggtttgattgcaactggtgaatatccatcaccagttgcaattgctgatgtaaccactacaactacgcataaaacacttcggggccctaggggtggtttaattttagccaagtctaacaagacaatagaaaagaaacttaatgctgctattttccctggtatccagggcgggccactaatgcatatcattgctgctaaagcagtgagttttaaagaagctatgagtgatgaatataagacttatcagaagcaagtaaagattaatgcacaagtaatggctaatacatttattaaacgtggatttgatgtagtttcaggtggtacggataatcatttattcttagtaagttttattgaccaaggattaacaggtaaagcagtggatactgctttaggcagtgcgtatatcacggttaatatgaatgcagtgccaaacgacccgaaccctccttttgtaactagtggtattcgtgtaggtacaccatcggtgacaacacgtggattcaatgagattgattgttctgatttagcatcttggatgtgcgatatttgtgatgatttagggaatcaagaagtgatttataagattagaggaagagtcgttagtctttgtgctaaatatccagtttatttagatgattaa

SEQ ID NO: 10118 - protein, 419 aa, Candidatus Vesicomyosocius okutanii HA
MFDKSQTLAKVDAEIYKAIVLEETRQETHIELIASENYTSPAVMETQGSKLTNKYAEGYPCKRYYGGCEYVDMVEQLAIDRAKTLFGADYANVQPHSGSQANAAVFQALLVPGDTILGMSLAHGGHLTHGATPSFSGKNFNSIQYGLNQKTGEIDYEQVEVLAKRYKPKMIIAGFSAYSRMVDWQRFREIADSVGAYLMVDMAHVAGLIATGEYPSPVAIADVTTTTTHKTLRGPRGGLILAKSNKTIEKKLNAAIFPGIQGGPLMHIIAAKAVSFKEAMSDEYKTYQKQVKINAQVMANTFIKRGFDVVSGGTDNHLFLVSFIDQGLTGKAVDTALGSAYITVNMNAVPNDPNPPFVTSGIRVGTPSVTTRGFNEIDCSDLASWMCDICDDLGNQEVIYKIRGRVVSLCAKYPVYLDD

SEQ ID NO: 10119 - DNA, 1290 bp, Synechococcus sp. WH 7803
  CDS (1)..(1290): transl_table=11
atggtggatttcgaaaccgctccgatcaatgcaccactggcagagtctgatccagcgattgcccgtttgatcgatcaggagcgcgatcgccaggaaacccatctcgagctgattgcctcggaaaacttcgcatcgagcgccgtgatggctgctcagggctcggtgttgaccaataaatacgcggaaggcctgccgaacaagcgctactacggcggttgtgagcacgtggatgccattgaagacctggcgattgagcgggccaaggaactcttcggtgctgcctgggccaacgttcagccgcacagtggtgctcaggccaatttcgctgtcttcctggccctgctgcagcccggcgacacgatcatgggtctggacctgtcccatgggggccacctgacccatggctcaccggtgaatgtgagcggcaaatggttcaacgttgtccagtacggggtcgacaaagagacccagcgcttggatatggaggcgatccgtcagctcgccctcgagcacaagcccaagctgatcgtttgcggtttttcggcttacccccgcaccatcgattttgcggcgttccgtgcgattgctgatgaggttggggcttacctcctggctgatatggcccatatcgcaggcctggtggcagccggcgtccatcccagcccggtcccccattgcgatgtggtcaccaccaccacgcacaaaaccctgcgcggtccccgcggtggtctgatcctttgccgggatgccgagttcgccaaaaagttcgacaaggccgttttccccggttcgcaaggtggaccccttgagcatgtgatcgcagccaaagccgtggcctttggcgaggcactccgtcctgcgttcaaggcttacagccaacaggtggtggccaatgcccaggccctggccgaccgcctgatggcccgtggcatcgatgtggtgagcggagggaccgataaccatgtggtgctgcttgatctgcgcagcatcggcatgaccgggaaggtggccgacctgctggtcagcgatgtgcacatcaccgcgaacaagaacacggttccgtttgatccagaatcacccttcgtcaccagcggtctgcgcttaggaaccgctgcgctcacgacccgtggcttcgatgctgacgcgttcgctgaagtggccgaggtgattgctgatcgtttgctcaatccagaagacgatgccattcaggcccgttgcctggagcgggtggccagtctctgtcggcgttttcccctctacgcgatggcaacggaaccggcgcttgtctga

SEQ ID NO: 10120 - protein, 429 aa, Synechococcus sp. WH 7803
MVDFETAPINAPLAESDPAIARLIDQERDRQETHLELIASENFASSAVMAAQGSVLTNKYAEGLPNKRYYGGCEHVDAIEDLAIERAKELFGAAWANVQPHSGAQANFAVFLALLQPGDTIMGLDLSHGGHLTHGSPVNVSGKWFNVVQYGVDKETQRLDMEAIRQLALEHKPKLIVCGFSAYPRTIDFAAFRAIADEVGAYLLADMAHIAGLVAAGVHPSPVPHCDVVTTTTHKTLRGPRGGLILCRDAEFAKKFDKAVFPGSQGGPLEHVIAAKAVAFGEALRPAFKAYSQQVVANAQALADRLMARGIDVVSGGTDNHVVLLDLRSIGMTGKVADLLVSDVHITANKNTVPFDPESPFVTSGLRLGTAALTTRGFDADAFAEVAEVIADRLLNPEDDAIQARCLERVASLCRRFPLYAMATEPALV

SEQ ID NO: 10121 - DNA, 1248 bp, Geobacter uraniireducens Rf4
  CDS (1)..(1248): transl_table=11
atgtcaattctggaaacatttgacccggcggtagcaaatgccattcgcctggaaaccgaacgtcaggaatataacctggaacttattgcctcggagaacttcgtttctgaagccgtgatggaggctcagggatcggtgttaaccaacaaatatgcagaaggttatcccggtaaacgttattatggcggttgccacaacgtcgacatcgtcgagaatctggccattgaacgggccaaggagctttttggtgctgaacacgccaatgtgcagccacactccggctcacaggcaaatatggcggtttattttaccgtgctgaagcccggcgacacggtattggggatgaacctggcccatggcgggcatctgacccacggcagcccggtgaatttctccggcaagttcttcaatatcgttccctacggcgtgacccgggaaaatcagaccatcgactatgatgaggtggaaagactgaccctggagcacaaaccgaaaatgatagtcgtcggagccagcgcctatccgcgcattatcgattttgccgcttttcgtaaggttgccgacaaggtcggagcggtggtaatggtggatatggcccacattgccggtctggttgccgccggtcttcatccgagtcccgttccccatgccgagtttgtcacaactaccacgcataagacattgcgcggtccccgcggcggcatgattctttgccgcgaggagtttgccaaggcactcaactccaatatctttcccggtattcagggtgggccgctcatgcacgcaattgctgccaaggcggtcgccttcaaggaggctttggcgccggagttcaagacatatcaggagcagatcgtaaagaacgccaaggctctggccgccggactcgtaaagcaaggattcaaactgacatcgggcggaaccgacaaccatctgatgctggttgacctctcagaaacacagcttaccggcaaagtagccgaagaagcactggataaggcgggaatcaccgtcaacaagaacggtattccgtttgatacccgttctccctttatcacgtcaggtattcgtatcggcacacctgctgccactacgcacggcctcaaagaggcgaacatggaagaagtggctgtcttgattgccgatgccctggccaacgttgagaatgaaacaaagctggccgaggtaaagggccgggtaaatgccatgatgaaacgctttccgttgtatgcccaccgattggcatag

SEQ ID NO: 10122 - protein, 415 aa, Geobacter uraniireducens Rf4
MSILETFDPAVANAIRLETERQEYNLELIASENFVSEAVMEAQGSVLTNKYAEGYPGKRYYGGCHNVDIVENLAIERAKELFGAEHANVQPHSGSQANMAVYFTVLKPGDTVLGMNLAHGGHLTHGSPVNFSGKFFNIVPYGVTRENQTIDYDEVERLTLEHKPKMIVVGASAYPRIIDFAAFRKVADKVGAVVMVDMAHIAGLVAAGLHPSPVPHAEFVTTTTHKTLRGPRGGMILCREEFAKALNSNIFPGIQGGPLMHAIAAKAVAFKEALAPEFKTYQEQIVKNAKALAAGLVKQGFKLTSGGTDNHLMLVDLSETQLTGKVAEEALDKAGITVNKNGIPFDTRSPFITSGIRIGTPAATTHGLKEANMEEVAVLIADALANVENETKLAEVKGRVNAMMKRFPLYAHRLA

SEQ ID NO: 10123 - DNA, 1299 bp, Acidiphilium cryptum JF-5
  CDS (1)..(1299): transl_table=11
atgaaccagcagagcccgatcgcgaacatctcgcgcttcttcaatgcccctctcgccgagaccgatcctgatctcgcggcggcgatcggccgcgaactcggccgccagcaggacggcatcgagctgatcgcctccgagaatatcgtctcccgcgccgtgctcgaggcccaggggtcggtgctgaccaacaaatacgccgaaggctatcccggcaagcgctactatggcggttgtgcggcggtcgatatcgccgaggaactggcgatcgcgcgcgcgaaggagctgttcggctgcgccttcgccaatgtccagccgcattccggcgcgcaggccaaccaggcggtgttcctcgccctgctcaacgcgggcgacacgattctgggcatgagcctcgccgccggcggccatctgacccatggggcggcgccgaacctgtccggcaagtggttcgacgccgtgcagtatggcgtgaagcgcgaggatggcaccctcgattacgaggagctggagcgcctcgcgcgcgagcgcaagccgaagctgatcatcgctgggggctcggcctatccgcgcttcatcgactttgcccgcatccgcaaggtggcggacgaggtcggcgcctatttcatggtcgacatggcgcatttcgccgggctcgtcgcggccgggatcttcccctcgccggtgcctcacgcgcatgtcgttaccacgacgacgcacaagaccctgcgcggcccgcgcggcggcatgatcctctccaacgacctcgacctcggcaagaagatcaactcggcggtgttccccggcctgcagggcggcccgctgatgcatgtgatcgcggcgaaggcggtcgccttcggcgaggcgctccgccccgaattccgcgcctaccagaaggcgctggccgaaaatgccaaggtgctggcggaaacgctggtcgagggcggtctcgatatcgtgaccggcgggaccgactgccatctcatgctggtggatctccgcccgaagaacgtgaccggcaaggcggcggaagcctcgctcgagcgcgcccacatgaccgcgaacaagaacgcgattccgttcgacccggcgaagccggcggtcacctccggcattcgcctcggcacgccggcggcgacgacgcgcggtttcggacccgacgagttccgtatggtcggccgtttcatcgtcgaggtgctggacgggctctccgcatcgaacgacggtgacaacgccgccgtcgaggcggcggtgggcgccaaggtgctggagctctgcgcccggttcccgatctaccggtaa

SEQ ID NO: 10124 - protein, 432 aa, Acidiphilium cryptum JF-5
MNQQSPIANISRFFNAPLAETDPDLAAAIGRELGRQQDGIELIASENIVSRAVLEAQGSVLTNKYAEGYPGKRYYGGCAAVDIAEELAIARAKELFGCAFANVQPHSGAQANQAVFLALLNAGDTILGMSLAAGGHLTHGAAPNLSGKWFDAVQYGVKREDGTLDYEELERLARERKPKLIIAGGSAYPRFIDFARIRKVADEVGAYFMVDMAHFAGLVAAGIFPSPVPHAHVVTTTTHKTLRGPRGGMILSNDLDLGKKINSAVFPGLQGGPLMHVIAAKAVAFGEALRPEFRAYQKALAENAKVLAETLVEGGLDIVTGGTDCHLMLVDLRPKNVTGKAAEASLERAHMTANKNAIPFDPAKPAVTSGIRLGTPAATTRGFGPDEFRMVGRFIVEVLDGLSASNDGDNAAVEAAVGAKVLELCARFPIYR

SEQ ID NO: 10125 - DNA, 1284 bp, Thermotoga petrophila RKU-1
  CDS (1)..(1284): transl_table=11
atgtggaaacatgtaaaacaggttgatcccgaaatatacgaagttcttgtgaacgagttgaagcgtcaagagtacggcctggagctgatcgcctctgagaacttcgcgtcactcgctgtcatagaaaccatgggaagcatgctcaccaacaagtacgcggaaggatacccgcagaagaggtactacggtggctgcgaatgggtggatcgagcagaagaactcgctatagagagagcgaagaggttgtttggagccaaatttgcgaacgttcagccgcactccggttctcaggcgaacatggcggtttatctggcactcgcccagcccggagacacgatcatgggaatgtccctgtctcacgggggacacctcacccatggagcgccggtgaatttctcagggaagatcttcaaggtggtaccctacggagtcaatctggaaacggaaacgatagattacgatgaggtcagaagactcgccctggaacacaagccaaagataatcgttgcgggtggaagtgcttacgccaggatcatcgatttcaaaagattcagagagatagccgatgaggtgggagcatatttgatggtggatatggctcactttgccggactcgtcgctgcaggaattcatccgaatcctttggagtacgcccacgtggtgacttctaccacacacaagaccctcaggggacccagaggtggtttgatactcacgaacgatccggatatcgccaaagccgtggataaaactatcttccccggtatccagggtggtcctctcatgcacgtcatagcggcgaaagccgtctgtttcaaagaagccatgacggaggagttcaaagagtaccagaagcaggtggtcaaaaatgctaaaaagatggctgaagagttccagaaacgaggttacaggatcgtttctggaggaactgatacacacttgttcctggtggatctcacaccaaaagacataacgggtaaagcggcggaaaaggccctggaaagctgtggtatcacagtgaacaaaaacaccattcccaacgaaaagagatctccgttcgtggcgagcggtatcagaataggaacacccgctgttacaacccgcggaatgaaggaagaagagatggaagagatcgccgagatgatagacctggttctttcaaacgtgaccgatgaaaacggaacggtgaaaccagaggtgagggaagaggtttcaaagagggtaagggagctctgcgaaaggtttcccctgtaccgcgacaagatcgaaggggtggaaatatga

SEQ ID NO: 10126 - protein, 427 aa, Thermotoga petrophila RKU-1
MWKHVKQVDPEIYEVLVNELKRQEYGLELIASENFASLAVIETMGSMLTNKYAEGYPQKRYYGGCEWVDRAEELAIERAKRLFGAKFANVQPHSGSQANMAVYLALAQPGDTIMGMSLSHGGHLTHGAPVNFSGKIFKVVPYGVNLETETIDYDEVRRLALEHKPKIIVAGGSAYARIIDFKRFREIADEVGAYLMVDMAHFAGLVAAGIHPNPLEYAHVVTSTTHKTLRGPRGGLILTNDPDIAKAVDKTIFPGIQGGPLMHVIAAKAVCFKEAMTEEFKEYQKQVVKNAKKMAEEFQKRGYRIVSGGTDTHLFLVDLTPKDITGKAAEKALESCGITVNKNTIPNEKRSPFVASGIRIGTPAVTTRGMKEEEMEEIAEMIDLVLSNVTDENGTVKPEVREEVSKRVRELCERFPLYRDKIEGVEI

SEQ ID NO: 10127 - DNA, 1281 bp, Orientia tsutsugamushi str. Boryong
  CDS (1)..(1281): transl_table=11
atgtgtaaagaaatatatgatttaattgctaaagaattatatagacagcaatcaacaatagaattaatagcatcagagaattttactagtaaagcagtcatgctagctcaaggttctattcttacaaataaatatgcagaaggatatatcaataaaagatattatggtggctgtgaatttattgatgaggtagaaagtatggctattgatagagtaaaaaagctttttaagtgcaactatgcgaatgtacaaccacattctggttctcaagctaatcaagcagtatttttagccttgttaaagcctggtgatacaattttagctatggatttaaatagtggtggtcatttaacccatggcgctaaacctaatatttctggcaaattttttaatgcagttcattactgtgttaacaaagatagttatttaattgactataatgaagttgaaatgctagctcagcagcataaaccaaaacttataattgttggttattcagcttattcaagaaagataaattttgcaacatttaaagaaatagcagataaggtaggagcatatcttttagcagatattgcgcatattgctggattagtggctacagagtatcattctagtcctataccatatgctcatattgtaactagcactactcataagactttaagaggtccaagaggtggattgattctaagtaatgatgaatcaataagtaaaaaaattaattctgctgtatttccaggtatgcaaggcggtccattaatgcatgtcatcgctgctaaagcaattgctttctctgaagcattaatgcctcaatataaagaatatattaatcaagtaatgttaaatgcgaaggtactagctaagttactacaagacagaggttataatattttaacaggtggaacagataatcatatgctgctagtagatttaagaggaaagaatatcacaggacaagaagctgaatatttactagatgcagctggcattacttgtaataaacaagtaatgccttttgatactacttctccaaccattacatctggtattagattaggaactccagcctgtactactagaggctttaaagaaaatgaatttattactgtaggaaaatatattgctgatattttagacaatattgcaataattaagtctgcaaaaaaaaatgaaggtatcactattactgaaattgaaaaaagtttgaatagtgtcattactagaacaaaacatcatgtacaagaattatgtaattgttttccaatttatactaactag

SEQ ID NO: 10128 - protein, 426 aa, Orientia tsutsugamushi str. Boryong
MCKEIYDLIAKELYRQQSTIELIASENFTSKAVMLAQGSILTNKYAEGYINKRYYGGCEFIDEVESMAIDRVKKLFKCNYANVQPHSGSQANQAVFLALLKPGDTILAMDLNSGGHLTHGAKPNISGKFFNAVHYCVNKDSYLIDYNEVEMLAQQHKPKLIIVGYSAYSRKINFATFKEIADKVGAYLLADIAHIAGLVATEYHSSPIPYAHIVTSTTHKTLRGPRGGLILSNDESISKKINSAVFPGMQGGPLMHVIAAKAIAFSEALMPQYKEYINQVMLNAKVLAKLLQDRGYNILTGGTDNHMLLVDLRGKNITGQEAEYLLDAAGITCNKQVMPFDTTSPTITSGIRLGTPACTTRGFKENEFITVGKYIADILDNIAIIKSAKKNEGITITEIEKSLNSVITRTKHHVQELCNCFPIYTN

SEQ ID NO: 10129 - DNA, 1254 bp, Legionella pneumophila str. Corby
  CDS (1)..(1254): transl_table=11
atgtttgacgaaagttatactataaaaaattttgatgatgttctttttaaagcaatttctgatgaaaaacgacgccaagaagaacacattgaattaatagcatctgaaaattatgtcagcccgagagtattggaggctcagggttctgtgttgacgaataaatacgctgaaggatatccaggcaaacgctattacggaggttgtgagtttgttgatgtcgctgaagagttagccatttcaagggcaaaattactttttggcgctcattatgtcaatgtgcaaccccattcgggatcacaagcgaacgcagcagtcatgatggcattattgtccccaggcgatacttttatgggcatggctttacctcatggtgggcacttgactcatgggtcaaaggttaatttttcaggtaaattataccattctgtcgagtatggtgttgatagcaatacgggtttgattgattatgatgctctggaaaaacttgcgcttcaacacaaaccaaaattgatcattgccggtttttcagcttattccaggatcctggattgggctcgatttagagaaattgccgataaggtcggcgcttatttaatggcggacatcgctcatgtagctggtctggtggctgtagggttatatccttctcctgttccttatgcggatgttgtgacaacgacaactcataaaactttaagaggacctcgcggtggtttaatcctttgtaaggaaaacgaagaaattgagaaaaaattaaattcttctgtatttcctggtatgcaaggtgggcccttaatgcatgtaattgcagccaaggcagttgcttttgcagaagctctgttacccgaatttaaaacttatcagcaacaggttttagctaatgccagaacgatgtgcagtgtgttacaaagcagaggctatgatattgtttctggcggaactgataatcatcttttgctagtggatttgataaataaaggaattacaggtaaagaagctgacgctgctttaggcagagctaacataacagtcaataaaaattcggttcccaatgatcctcgctcgccttttgtaacgagtggtttacgtttgggtacgcctgctgcaaccacaagaggctttaaagaaagagagattactttgttatctaactgggtagcggatgtccttgataatgttcatgatgaaactaatatttcaagagtgaaaacccaggtgttgctactctgtcgtgaatttccggtttatgcctaa

SEQ ID NO: 10130 - protein, 417 aa, Legionella pneumophila str. Corby
MFDESYTIKNFDDVLFKAISDEKRRQEEHIELIASENYVSPRVLEAQGSVLTNKYAEGYPGKRYYGGCEFVDVAEELAISRAKLLFGAHYVNVQPHSGSQANAAVMMALLSPGDTFMGMALPHGGHLTHGSKVNFSGKLYHSVEYGVDSNTGLIDYDALEKLALQHKPKLIIAGFSAYSRILDWARFREIADKVGAYLMADIAHVAGLVAVGLYPSPVPYADVVTTTTHKTLRGPRGGLILCKENEEIEKKLNSSVFPGMQGGPLMHVIAAKAVAFAEALLPEFKTYQQQVLANARTMCSVLQSRGYDIVSGGTDNHLLLVDLINKGITGKEADAALGRANITVNKNSVPNDPRSPFVTSGLRLGTPAATTRGFKEREITLLSNWVADVLDNVHDETNISRVKTQVLLLCREFPVYA

SEQ ID NO: 10131 - DNA, 1242 bp, Clostridium botulinum A str. ATCC 3502
  CDS (1)..(1242): transl_table=11
atggactttacaaatttaaaaaacacagatccagagctattagacatgataaagaaagaagaggaaagacaagaatataatatcgaattaatagcttcagaaaattttactagtttatctgtaatggagtctatgggatctttattgacaaataaatatgcagaaggatacccacataaaagatattatggaggatgtgaatttgtagatgaggtagaggatttagcaagagaaagattaaaaaaattatttgctgcagaacatgctaatgtacaaccacattctggttcacaagccaatatggcagtttatatgtctgtgcttcagactggtgatactatattaggtatggatttatctcatggcggacatttaactcatggaagtccagtaaatttttcaggaaaattatataattttatatcctatggtgtagataaagaaacagaaactatagattatgaaaaattaaagaaaatagccttagaaaatagacctaaaatgatagtatctggagctagtgcttatcctagaattatagactttcaaaagataagagaaatttgtgatgaaatagatgcttatatgatggtagatatggctcatatagcaggattagtagctacaggattacatccatcaccagtaccttatgcagattttgttacaacaactactcataaaactttaagaggacctagaggtggggctattttatgtaaagaaaaatatgcaaaagcagtagataaagctatattcccaggcattcaagggggaccattaatgcatactatagcagcaaaagccgtttgttttggggaagctttaagagaagattataaagaatatatgcagcaagttgttaaaaatactaaagtcttaggagaagaattaaaaaattatggatttagactaatatctggtggtacagataaccatttattactaatagatttaactaataaaaatataacaggaaaagatgcagaaaaacttttagattcagtaggaattactgtgaataaaaatacaataccttttgaaactttaagcccttttataactagtggaattagaataggaactccagcggtaactacgagaggatttaaggaagaagaaatgaaaaaaatagcctatttcatgaattattctatagaacatagggaagagaatttatctcaaataaaagagcaaataaaagaaatttgtaaaaaatacccattgtatcaaaatgcataa

SEQ ID NO: 10132 - protein, 413 aa, Clostridium botulinum A str. ATCC 3502
MDFTNLKNTDPELLDMIKKEEERQEYNIELIASENFTSLSVMESMGSLLTNKYAEGYPHKRYYGGCEFVDEVEDLARERLKKLFAAEHANVQPHSGSQANMAVYMSVLQTGDTILGMDLSHGGHLTHGSPVNFSGKLYNFISYGVDKETETIDYEKLKKIALENRPKMIVSGASAYPRIIDFQKIREICDEIDAYMMVDMAHIAGLVATGLHPSPVPYADFVTTTTHKTLRGPRGGAILCKEKYAKAVDKAIFPGIQGGPLMHTIAAKAVCFGEALREDYKEYMQQVVKNTKVLGEELKNYGFRLISGGTDNHLLLIDLTNKNITGKDAEKLLDSVGITVNKNTIPFETLSPFITSGIRIGTPAVTTRGFKEEEMKKIAYFMNYSIEHREENLSQIKEQIKEICKKYPLYQNA

SEQ ID NO: 10133 - DNA, 1281 bp, Bacteroides vulgatus ATCC 8482
  CDS (1)..(1281): transl_table=11
atgaaaagagacgatttgattttcgacattatcgaaaaagagcatcaacgccagctcaaaggtatcgagctgatcgcatccgaaaactttgttagtgaccaagtaatgcaagccatgggttcttgccttaccaacaagtatgctgaagggtatcccggcaagcgctactatggcggttgcgaagtggtagaccagagcgaacaaatcgctatcgacagactgaaacaaatatttggagcagaatgggctaatgtacaacctcactccggagcacaggctaatgctgctgtatttctggccgttttgaatccgggtgataaatttatgggattaaatttggcccatggtggtcacttgtcacatggttcattggtaaacacatccggaattatttatactccgtgtgaatacaacctgaacaaagaaacaggtcgtgtagattacgatcagatggaagaaatcgcattacgtgaaaaacccaaaatgattatcggtggcggttctgcatattctcgcgagtgggactacaaacgtatgcgtgaaatcgcagataaagtgggagccatcctgatgattgatatggcccaccctgccggactgattgctgccggactgttggacaacccggttaaatatgctcatatcgtcacttcaacaacccataaaacccttcgtggccctcgtggcggtgtcatcatgatgggtaaagacttccctaacccatggggcaagaaaactccaaaaggtgaaatcaagatgatgtcacaacttttggattctgctgtattccctggtatacaaggtggcccgttggaacatgtcatcgcagccaaagctgttgcattcggtgaatgtttacagccggaatacaaagaatatcaaacacaagtaaaaaagaatgcagccgtattggcacaggctttgattgaccgtggctttacgatcgtttccggtggtacagacaaccactccatgctggtagacctgcgtaccaaataccctgatctgacaggcaaagtagcagaaaaagcattggttgctgctgatatcactgtaaacaagaacatggtcccatttgacagccgttctgctttccaaacttcaggtatccgtttgggaactcccgctatcacaactcgcggagcaaaagaagacttgatgttggaaatcgccgaaatgattgagacagttctttcaaacgtagacaatgaagaagtaattgcacaagttcgtgcacgcgtaaacgaaacaatgaagaaatatcctattttcgcttactaa

SEQ ID NO: 10134 - protein, 426 aa, Bacteroides vulgatus ATCC 8482
MKRDDLIFDIIEKEHQRQLKGIELIASENFVSDQVMQAMGSCLTNKYAEGYPGKRYYGGCEVVDQSEQIAIDRLKQIFGAEWANVQPHSGAQANAAVFLAVLNPGDKFMGLNLAHGGHLSHGSLVNTSGIIYTPCEYNLNKETGRVDYDQMEEIALREKPKMIIGGGSAYSREWDYKRMREIADKVGAILMIDMAHPAGLIAAGLLDNPVKYAHIVTSTTHKTLRGPRGGVIMMGKDFPNPWGKKTPKGEIKMMSQLLDSAVFPGIQGGPLEHVIAAKAVAFGECLQPEYKEYQTQVKKNAAVLAQALIDRGFTIVSGGTDNHSMLVDLRTKYPDLTGKVAEKALVAADITVNKNMVPFDSRSAFQTSGIRLGTPAITTRGAKEDLMLEIAEMIETVLSNVDNEEVIAQVRARVNETMKKYPIFAY

SEQ ID NO: 10135 - DNA, 1281 bp, Parabacteroides distasonis ATCC 8503
  CDS (1)..(1281): transl_table=11
atgaaaagagacaacatcatttttgacattatcgagaaggagcaccaacgccaattgaaaggcattgagttgatcgcttccgagaactttgtcagcgaccaggtcatgcaggccatgggaagctgtctgaccaacaaatacgccgagggatatcccggcaagcgttattatgggggttgcgaggtagtagaccaaagtgagacgatcgctatcgaacggttgaaaaagctattcaacgcagaatgggccaacgtgcagcctcactccggggcgcaggccaacgcagccgtattcttcgccgtattgaatccgggcgacacgttcctcgggttgaacctgtcgcatggcggacacctgtcccacggttcaccagtaaatagctccggcgttctctatcacgctaccgaatataatgtaaaggaagataccggacgggtggactacgaccagatggaggaagtagcccttcgtgagaaaccgaaattgatcgttggcggtggttccgcttattcccgtgactgggattacaaacgtatgcgtgagatagccgacaaggtaggcgccttattgatgatcgatatggcccacccggcaggcctgatcgccgccggtttgctgaacaacccgctggagtacgctcacatcgtaacgtctacgacgcataagaccctgcgtggtcctcgtggcggtatcatcctgctgggtaaggatttcgagaatccttggggcaagaagacaccgaaaggcgagatcaagaagatgtctcagttgttggactccgccgtattcccgggtatccaaggcggtccgctggagcatgtgatcgcagccaaggccgtagccttcggagaggctttggagccggaatacaagacgtaccaagcacaggtgaaagcgaacgccgccgctatggccaaggccttcacggacaaagggtacaagatcatctccggcggtacggacaaccacagcatgctgatcgacctgcgcacgaagttccccgacctgaccggtaaagtggccgagaaagccttggtagccgccgacatcacggtgaacaagaacatggttccgttcgacagccgctcggccttccagacctccggtatccgtgtgggtacgcccgctatcacgacccgtggcgctaaagagccgcttatgggcgagatcgtggaactgatcgacaccgtattggccgctcccgaatgcgataagaccatcggtgccgttcgtgagaaggtgaacggtatcatgaaggaatatcctatcttcgcatggtaa

SEQ ID NO: 10136 - protein, 426 aa, Parabacteroides distasonis ATCC 8503
MKRDNIIFDIIEKEHQRQLKGIELIASENFVSDQVMQAMGSCLTNKYAEGYPGKRYYGGCEVVDQSETIAIERLKKLFNAEWANVQPHSGAQANAAVFFAVLNPGDTFLGLNLSHGGHLSHGSPVNSSGVLYHATEYNVKEDTGRVDYDQMEEVALREKPKLIVGGGSAYSRDWDYKRMREIADKVGALLMIDMAHPAGLIAAGLLNNPLEYAHIVTSTTHKTLRGPRGGIILLGKDFENPWGKKTPKGEIKKMSQLLDSAVFPGIQGGPLEHVIAAKAVAFGEALEPEYKTYQAQVKANAAAMAKAFTDKGYKIISGGTDNHSMLIDLRTKFPDLTGKVAEKALVAADITVNKNMVPFDSRSAFQTSGIRVGTPAITTRGAKEPLMGEIVELIDTVLAAPECDKTIGAVREKVNGIMKEYPIFAW

SEQ ID NO: 10137 - DNA, 1275 bp, Thermosipho melanesiensis BI429
  CDS (1)..(1275): transl_table=11
gtgtgggaaaatgtaaaaaaagttgatcctgagatatacgaagttatattaaaagaatgggatagacaggaatatggactagaacttattgcatctgaaaattttgcatctcttgcggtaatagaagccatgggtagtgttttaacaaataaatatgcagagggttacccaggtagaaggtattacggaggatgtgaatgggttgacgttgcagaaaaattagcaagagatagggcaaaagaattgttcaatgtgaagtatgcaaatgtacaaccacactctggttcacaggcaaacatgggtgcgtattttgctgtttcagaacctggtgacacaataatggggatgtctttgagtcacggaggacatcttacccatggtgcgcctgttaacttttctggaaggatatataacgtggtatcttatggagttgattctgagacagaagtaattaattatgatgaagtaagagaacttgctttaaagcacaaaccaaaaatcattatagcaggtggaagtgcatattctaaaataatagattttaagagatttagggaaatagctgatgaggttggagcttatttaattgtggatatggcacattttgctggacttgttgctgcaggtatttatccaaaccccgcagagtatgcacatattgttacaagtaccacgcataaaaccttaaggggaccaagaggtggtatgattcttacaaacgataaagaactttacaaggcaataaataaatctatctttcctggtattcaaggtggtcctttgatgcatgttattgctgcaaaagctgtttgtttcaaagaagcgttgaccgatgagtttaaagcatatcaaaatcaagttgtaaagaacgcaaagaaattggcagaagaattggaaaaaagaggattaagaattgtttctggtggtacagatacgcatttaatgttggttgatttaaatcctcttaatgttactggaaaggcagcagaaatagcattgggtaaatgtcatgttaccgttaataaaaacacaattccaaatgaaacaagatcaccatttgttgcaagtggaataaggcttggtactcctgcacttacaacaagaggtatgaaagaaagtgaaatggaagaaatagcagaactaatagtaaaagtactagaaaatgtgaaagatgaagaggggaatgtagatgatagtatagtagaagatgtacagaaaaaggtaagagatttgtgtgaaagatttccattgtacgaaggaaagataaggttataa

SEQ ID NO: 10138 - protein, 424 aa, Thermosipho melanesiensis BI429
MWENVKKVDPEIYEVILKEWDRQEYGLELIASENFASLAVIEAMGSVLTNKYAEGYPGRRYYGGCEWVDVAEKLARDRAKELFNVKYANVQPHSGSQANMGAYFAVSEPGDTIMGMSLSHGGHLTHGAPVNFSGRIYNVVSYGVDSETEVINYDEVRELALKHKPKIIIAGGSAYSKIIDFKRFREIADEVGAYLIVDMAHFAGLVAAGIYPNPAEYAHIVTSTTHKTLRGPRGGMILTNDKELYKAINKSIFPGIQGGPLMHVIAAKAVCFKEALTDEFKAYQNQVVKNAKKLAEELEKRGLRIVSGGTDTHLMLVDLNPLNVTGKAAEIALGKCHVTVNKNTIPNETRSPFVASGIRLGTPALTTRGMKESEMEEIAELIVKVLENVKDEEGNVDDSIVEDVQKKVRDLCERFPLYEGKIRL

SEQ ID NO: 10139 - DNA, 1236 bp, Clostridium beijerinckii NCIMB 8052
  CDS (1)..(1236): transl_table=11
atgaattttgaaaatatacaaagagaagataaagaaatttatgatttaattgaaaaagagctagttagacaacaaaaaggaatagaattaatagcttcagaaaatattgtaagtccagctgttatggaagctatgggctcttatttaactaataaatatgctgagggatatccaaataaaagatattatggaggatgtcacgttgtagatgaaatagaacaaattgcaattgatagagctaaggaattatttggggcagagcatgctaatgttcaacctcattcaggttcacaagcgaatatggctgtatattttgcagtattagaaccaggagatactgtattgggtatggatttgagccatggtggacatttaactcatggttctccagttaacttttcaggaaaattgtttaactttgtatcttatggagttgataaagaaactgagatgattgactatgaaaatgtaagaaagctagctattgaaaataagccaaagcttatagttgctggtgcaagcgcatatgcaagaattttagattttccaaagtttagagaaatagctgatgaagttggtgcattactaatggtagatatggctcatattgcaggacttgttgctgcaggtgttcatccatcaccagtgccatattctgattttgtaacaacaacaactcataagactttaagaggtccaagaggtgggttaatactttgtaaagagaaatatgctcaaatattaaataaaaacatatttcctggaatacaaggaggtcctttagagcatattatagctgctaaggctgtttgttttaaagaagcattagatccaagttttaaaacatatggagaaaatgtagttgaaaactgtaaagaacttgcagaacaattaatagctagaggttttaaaattgtatcaggtggaacagataaccatgtattcttagttgatttaaataacaaagacataacaggaaaagaagcggaggctttattagattccgttggaataactgttaataaaaacacagtacctaatgaaacaagaagtccatttgtaacttcaggaatcagaattggtacagcagcgataacaactagaggttttgtaaaggatgatatggctgaaattgcagcggttatatcagaggcaatagagaatagagatggagatttatcggctcttaaaactagaatagaaactttatgcgataaacatccactatacaattaa

SEQ ID NO: 10140 - protein, 411 aa, Clostridium beijerinckii NCIMB 8052
MNFENIQREDKEIYDLIEKELVRQQKGIELIASENIVSPAVMEAMGSYLTNKYAEGYPNKRYYGGCHVVDEIEQIAIDRAKELFGAEHANVQPHSGSQANMAVYFAVLEPGDTVLGMDLSHGGHLTHGSPVNFSGKLFNFVSYGVDKETEMIDYENVRKLAIENKPKLIVAGASAYARILDFPKFREIADEVGALLMVDMAHIAGLVAAGVHPSPVPYSDFVTTTTHKTLRGPRGGLILCKEKYAQILNKNIFPGIQGGPLEHIIAAKAVCFKEALDPSFKTYGENVVENCKELAEQLIARGFKIVSGGTDNHVFLVDLNNKDITGKEAEALLDSVGITVNKNTVPNETRSPFVTSGIRIGTAAITTRGFVKDDMAEIAAVISEAIENRDGDLSALKTRIETLCDKHPLYN

SEQ ID NO: 10141 - DNA, 1254 bp, Klebsiella pneumoniae subsp. pneumoniae MGH 78578
  CDS (1)..(1254): transl_table=11
atgttaaagcgtgaaatgaacattgccgattatgatgccgaactgtggcaggctatggagcaggaaaaagtacgtcaggaagagcacatcgaactgatcgcctccgaaaactacaccagtccgcgcgttatgcaggcgcagggctctcagctgaccaacaaatatgctgaagggtatccgggcaagcgttactacggcggctgtgaatacgtcgacgtggttgaacagctggcaatcgaccgcgcgaaagaactgttcggcgctgactatgctaacgtccagccgcactccggctcccaggctaactttgccgtctacaccgcgctgctgcagccgggcgacaccgtgctcggtatgaacctggcgcagggcggccacctgactcacggctccccggttaacttctccggcaaactgtacaacatcatcccttacggtattgatgagtccggtaaaattgactacgacgacatggcgaagcaggctcaggaacacaaaccgaagatgatcatcggtggtttctccgcttactccggtatcgttgactgggcgaaaatgcgtgaaatcgctgacagcatcggcgcttacctgttcgtcgatatggcgcacgtggcaggcctgattgccgctggcgtgtacccgaacccggttccgcatgctcacgttgtgaccaccaccacccacaaaaccctggcgggtccgcgcggcggcctgattctggcgaaaggcggtagcgaagagctgtacaaaaaactgaactctgcagtgttcccaagcgcgcagggcggcccgctgatgcacgttatcgcggcgaaagcggtggcgctgaaagaagcgatggagccagagtttaaagtttaccagcagcaggttgcgaaaaacgctaaagcgatggtggaagtgttcctgaaccgcggctacaaagtggtgtctggcggtactgagaaccacctgttcctgctggacctggtggataaaaacctgaccggtaaagaagctgacgctgccctgggccgcgccaacatcaccgtcaacaaaaacagcgtgccgaacgatccgaagagcccgttcgtaacctccggtatccgtatcggttctccggcagtgactcgccgcggctttaaagaagcggaagtcaaagagctggctggctggatgtgtgacgtgctggacaatatcaatgacgacgcggtcattgagcgcgtgaaaggtaaagtgctggatatctgcgcccgcttcccggtatatgcgtaa

SEQ ID NO: 10142 - protein, 417 aa, Klebsiella pneumoniae subsp. pneumoniae MGH 78578
MLKREMNIADYDAELWQAMEQEKVRQEEHIELIASENYTSPRVMQAQGSQLTNKYAEGYPGKRYYGGCEYVDVVEQLAIDRAKELFGADYANVQPHSGSQANFAVYTALLQPGDTVLGMNLAQGGHLTHGSPVNFSGKLYNIIPYGIDESGKIDYDDMAKQAQEHKPKMIIGGFSAYSGIVDWAKMREIADSIGAYLFVDMAHVAGLIAAGVYPNPVPHAHVVTTTTHKTLAGPRGGLILAKGGSEELYKKLNSAVFPSAQGGPLMHVIAAKAVALKEAMEPEFKVYQQQVAKNAKAMVEVFLNRGYKVVSGGTENHLFLLDLVDKNLTGKEADAALGRANITVNKNSVPNDPKSPFVTSGIRIGSPAVTRRGFKEAEVKELAGWMCDVLDNINDDAVIERVKGKVLDICARFPVYA

SEQ ID NO: 10143 - DNA, 1278 bp, Marinomonas sp. MWYL1
  CDS (1)..(1278): transl_table=11
atggcaaacaccgaagcctttttcagccaaactctcgctgaacgagatccagaactttttgcaacaatcaccgaagagcaagagcgtcaagaaactggcattgaattgatcgcttctgaaaacatcacttcaaaagctgttttagaagctcaaggttctgtgctaactaacaaatacgccgaaggctacccgcatcgtcgttactacggtggctgtgaagcagttgacgtaactgaacaacttgccattgatcgtgccaaaaaacttttcaactgtgagtttgtaaacgttcagcctcattctggcgctcaagctaacggtgcagttatgctagcactacttcaacctggcgacactattatgggcatgtcattgtcttctggtggtcacttaactcacggtgctgcaccagcacaatctggtaagtggtttaacgctgtacaatatgaagtaagcccagaaacactattgatcgattacgacgctattgaagcgcaagcactagaatgcaagccaaaaatgattattgcaggtggctctgccattcctcgtcaaatcgacttcaaacgctttcgtgaaatcgcagataaagtaggtgcttatctattcgttgacatggcccacattgcaggtcttgttgcgactggagttcatccatctccactacctcatgctcacgttgttacaacaacaacacacaaaactcttcgtggcccgcgtggcggcatgattttgtccaatgatcttgatctaggcaagaaaatcaactctgccgttttcccaggctaccaaggcggccctctaatgcacgttattgctggtaaagctgttgcattcggtgaagccttgaaacctgagtttactgactacattaagcaagtagtagctaacgctaaagcacttgctgaagtaatggtagaacgtggctgcgacattgtaactggtggcacagatacacacttaatgctagttgaccttcgtcctaaaggactaaaaggtaacgccgcagatgctgctctggaacgtgctggcattacctgtaacaaaaatggcattccatttgatactgagaaaccaatggtaacttcaggcatccgtctaggaacaccagcggcaacatcacgtggatttggaattgaagaattccaaaaagtgggtcatcttatcagtgacgtacttgacggtttagttgaaatgccagaaggcaatccagaagtagaagctcgtgtacttgcagaagtaagagagctttgtaaacgcttcccactttaccgctaa

SEQ ID NO: 10144 - protein, 425 aa, Marinomonas sp. MWYL1
MANTEAFFSQTLAERDPELFATITEEQERQETGIELIASENITSKAVLEAQGSVLTNKYAEGYPHRRYYGGCEAVDVTEQLAIDRAKKLFNCEFVNVQPHSGAQANGAVMLALLQPGDTIMGMSLSSGGHLTHGAAPAQSGKWFNAVQYEVSPETLLIDYDAIEAQALECKPKMIIAGGSAIPRQIDFKRFREIADKVGAYLFVDMAHIAGLVATGVHPSPLPHAHVVTTTTHKTLRGPRGGMILSNDLDLGKKINSAVFPGYQGGPLMHVIAGKAVAFGEALKPEFTDYIKQVVANAKALAEVMVERGCDIVTGGTDTHLMLVDLRPKGLKGNAADAALERAGITCNKNGIPFDTEKPMVTSGIRLGTPAATSRGFGIEEFQKVGHLISDVLDGLVEMPEGNPEVEARVLAEVRELCKRFPLYR

SEQ ID NO: 10145 - DNA, 1257 bp, Pseudomonas aeruginosa PA7
  CDS (1)..(1257): transl_table=11
atgttcagcaagcatgaccagatccgcggctacgacgacgaactgctcgccgcgatggacgccgaagaccggcggcaggaagaccacatcgaactgatcgcctcggagaactacgccagcaagcgggtcatgcaggcgcagggcagcggcctgaccaacaagtatgccgagggctatccgggcaagcgctactacggcggctgcgaacacgtcgacaaggtcgagcggctggccatcgaccgcgccaggcaactgttcggcgccgactacgccaacgtccagccgcactccggctcctcggccaacgccgcggtgtacctggcgctgctcaacgccggcgacaccatcctcggcatgagcctggcccatggcggtcatctcacccacggcgccaaggtgtcctcctccggcaagctgtacaacgccgtgcagtacggcctggacaccgccaccgggctgatcgactacgacgaagtcgagcgcctggccgtggagcataagccgaagatgatcgtcgccggcttctccgcctactccaagaccctcgacttcccgcgcttccgcgccatcgccgacaaggtcggcgcgctgctgttcgtcgacatggcccacgtcgccgggctggtcgccgccggcctctacccgaacccgatccccttcgccgacgtggtcaccaccaccacccacaagaccctgcgcggcccgcgcggcggcctgatcctggcgcgcgccaacgaggagatcgagaagaagctcaactccgcggtattccccggcgcccagggcggcccgctgatgcacgtgatcgcggccaaggcggtgtgcttcaaggaagcgctggaaccgggcttcaaagactaccaggcgcaggtgatccgcaacgcccgagcgatggccgaggtattcatcgggcgcggctacgacgtggtttccggcggtaccgacaaccacctgatgctgatcagcctggtgaagcagggcctgaccggcaaggccgccgacgctgcgctcggcgcggcgcacatcacggtgaacaagaacgccgtgccgaacgacccgcagagcccgttcgtcacctccggcatccgcatcggcaccccggcggtgaccactcgcggtttccgcgagggcgagtgccgagaactggccggctggatctgcgacatcctcgacgacatcgacaatcccgaggtcagcgaacgggtcaggggccaggtcggcgaattctgccggcacttcccggtctacgctgattga

SEQ ID NO: 10146 - protein, 418 aa, Pseudomonas aeruginosa PA7
MFSKHDQIRGYDDELLAAMDAEDRRQEDHIELIASENYASKRVMQAQGSGLTNKYAEGYPGKRYYGGCEHVDKVERLAIDRARQLFGADYANVQPHSGSSANAAVYLALLNAGDTILGMSLAHGGHLTHGAKVSSSGKLYNAVQYGLDTATGLIDYDEVERLAVEHKPKMIVAGFSAYSKTLDFPRFRAIADKVGALLFVDMAHVAGLVAAGLYPNPIPFADVVTTTTHKTLRGPRGGLILARANEEIEKKLNSAVFPGAQGGPLMHVIAAKAVCFKEALEPGFKDYQAQVIRNARAMAEVFIGRGYDVVSGGTDNHLMLISLVKQGLTGKAADAALGAAHITVNKNAVPNDPQSPFVTSGIRIGTPAVTTRGFREGECRELAGWICDILDDIDNPEVSERVRGQVGEFCRHFPVYAD

SEQ ID NO: 10147 - DNA, 1254 bp, Pseudomonas aeruginosa PA7
  CDS (1)..(1254): transl_table=11
atgttcagccgtgatttgaccctcgcccgctacgatgccgaactctttgccgcgatggagcaggaagcccagcgccaggaagagcacatcgagctgatcgcctccgagaactacaccagcccggcggtgatggaagcccagggttcggtgctgaccaacaagtacgccgaaggctacccgcacaagcgctactacggtggctgcgagtacgtcgacatcgtcgagcaactggccatcgaccgcgccaagcaactgttcggcgccgactacgccaacgtccagccgcatgccggctcccaggccaacgcggcggtctacctggccctgctgtcggccggcgacaccatcctcggcatgagcctggcccacggcggccacctgacccacggcgccagcgtctcctcctccggcaagctgtacaacgccgtgcagtacggcatcgacgccaacggtctgatcgactatgacgaagtcgagcgcctggccgtcgagcacaagccgaagatgatcgtcgccggcttctccgcctattcccaggtcctcgacttcccgcgcttccgcgccatcgccgacaaggtcggcgcctacctgttcgtcgacatggcccacgtcgccgggctggtcgccgctggcgtctacccgaacccggtgccgttcgccgacgtggtcaccaccaccacccacaagaccctgcgcggtccgcgcggcggcctgatcctggcgcgcgccaacgaagagatcgagaagaagctcaactccgcggtattccccggcgcccagggcggtccgctggaacacgtgatcgcggccaaggcggtgtgcttcaaggaagccctgcagccggagttcaagacctaccagcagcaggtcctgaagaacgcccaggcgatggcccaggtcttcatcgaccgcggcttcgacgtggtttccggcggcacccggaaccacctgttcctgctatccctgatcaagcaggacatcaccggcaaggacgccgacgccgctctcggccgcgcgttcatcaccgtgaacaagaactcggtcccgaacgacccgcgctcgcctttcgtcacctccggcctgcgcatcggtaccccggccgtgaccacccgtggcttcaaggaggccgaatgccgcgagctggccggctggatctgcgacatcctcgagaacatgggcgacgagtccgtggtcgacggcgtacgcgagaaggtcaaggcgatctgcgccaagttcccggtctacggcaactaa

SEQ ID NO: 10148 - protein, 417 aa, Pseudomonas aeruginosa PA7
MFSRDLTLARYDAELFAAMEQEAQRQEEHIELIASENYTSPAVMEAQGSVLTNKYAEGYPHKRYYGGCEYVDIVEQLAIDRAKQLFGADYANVQPHAGSQANAAVYLALLSAGDTILGMSLAHGGHLTHGASVSSSGKLYNAVQYGIDANGLIDYDEVERLAVEHKPKMIVAGFSAYSQVLDFPRFRAIADKVGAYLFVDMAHVAGLVAAGVYPNPVPFADVVTTTTHKTLRGPRGGLILARANEEIEKKLNSAVFPGAQGGPLEHVIAAKAVCFKEALQPEFKTYQQQVLKNAQAMAQVFIDRGFDVVSGGTRNHLFLLSLIKQDITGKDADAALGRAFITVNKNSVPNDPRSPFVTSGLRIGTPAVTTRGFKEAECRELAGWICDILENMGDESVVDGVREKVKAICAKFPVYGN

SEQ ID NO: 10149 - DNA, 1254 bp, Pseudomonas aeruginosa PA7
  CDS (1)..(1254): transl_table=11
atgttcagcaagcatgaccagatccgcggctacgacgacgagctgctcgccgcgatggacgccgaagaggcccgccaggaagaccatctcgaactgatcgcctcggagaactacaccagcaggcgggtcatgcaggcgcagggcagcggcctgaccaacaagtatgccgagggctatccgggcaagcgctactacggcggctgcgaacacgtcgacaaggtcgagcagctggccatcgaccgcgccaggcaactgttcggcgccgactacgccaacgtccagccgcactccggctcctcggccaacgccgcggtgtacctggcgctgctcaacgccggcgacaccatcctgggcatgagcctggcccatggcggtcatctcacccacggcgccaaggtgtcctcctccggcaagctgtacaacgccgtgcagtacggcctggacaccgccaccgggctgatcgactacgacgaagtcgagcgcctggccgtggagcataagccgaagatgatcgtcgccggcttctccgcctactccaagaccctcgacttcccgcgcttccgcgccatcgccgacaaggtcggcgcgctgctgttcgtcgacatggcccacgtcgccgggctggtcgccgccggcctctacccgaacccgatccccttcgccgacgtggtcaccaccaccacccacaagaccctgcgcggcccgcgcggcggcctgatcctggcgcgcgccaacgaagagatcgagaagaagctcaactccgcggtattccccggcgcccagggcggtccgctgatgcacgtgatcgcggccaaggcggtgtgcttcaaggaagcgctggaaccgggcttcaaggactaccaggcgcaggtgatccgtaacgcccgggcgatggccgaggtattcatcgggcgcggctacgacgtggtttccggcggcaccgacaaccacctgatgctgatcagcctggtgcgccagggcctgaccggcaaggaagccgacgccgccctcggccgagtcggcatcacggtgaacaagaacgccgtgccgaacgatccacagagcccgttcgtcacctccggcatccgcatcggcaccccggccatcaccacccgcgggctgcaggaagcgcagagccgcgaactggccggctggatctgcgacatcctcgaccacctcggcgatgccgacgtggaagccaaggtcgccacccaggtcgccggtctctgcgcggacttcccggtctaccgctga

SEQ ID NO: 10150 - protein, 417 aa, Pseudomonas aeruginosa PA7
MFSKHDQIRGYDDELLAAMDAEEARQEDHLELIASENYTSRRVMQAQGSGLTNKYAEGYPGKRYYGGCEHVDKVEQLAIDRARQLFGADYANVQPHSGSSANAAVYLALLNAGDTILGMSLAHGGHLTHGAKVSSSGKLYNAVQYGLDTATGLIDYDEVERLAVEHKPKMIVAGFSAYSKTLDFPRFRAIADKVGALLFVDMAHVAGLVAAGLYPNPIPFADVVTTTTHKTLRGPRGGLILARANEEIEKKLNSAVFPGAQGGPLMHVIAAKAVCFKEALEPGFKDYQAQVIRNARAMAEVFIGRGYDVVSGGTDNHLMLISLVRQGLTGKEADAALGRVGITVNKNAVPNDPQSPFVTSGIRIGTPAITTRGLQEAQSRELAGWICDILDHLGDADVEAKVATQVAGLCADFPVYR

SEQ ID NO: 10151 - DNA, 1248 bp, Nitratiruptor sp. SB155-2
  CDS (1)..(1248): transl_table=11
atggattttttgaaaaaccaagacccagccgtatatgagattttcgaaaaagagttgcaaagacagacagatcatcttgaaatgatcgccagtgaaaactttactagtccagctgtcatggaagccatgggcagtgtgtttaccaacaaatatgctgaaggctaccctggaaaaagatattatggcggatgcgaatatgctgatgccattgaagagttggcaattcaaagagcaaaagaactttttggatgtgagtttgttaacgttcaaccccactctggctctcaagccaatcaaggagtctatctcgcgcttttaaaaccatacgacaaaattttgggaatggatttaagccacggaggtcacctgactcatggggcaaaagtcaatgccagcgggaaaatctatcaaagtttcttttacggcgtcaatgacgagggatggatcgattatgatagggttttagatattgcaaagattgtcaagccaaaactgatcgtctgcggtgcaagcgcctatccaagagtaatcgattttaaaaagtttcgagagattgcggatgaagtgggtgcgcttttgatggcggatatcgctcatatcgccggtcttgtggctgcaggtgaacatccgagtcctttcccatactgcgatgtagttacaacgacgacccacaaaactcttcgaggtccaagaggcggtatgatcatgaccaatgatgccgatatcgctaaaaagatcaatagcgcaattttccctggaatccaaggtggtccgcttgttcacgtcatagcggcaaaagcggtcggttttggtgaaaatctcaaaccggaatggaaagagtatgcaaaacagatgcgcatcaacgcttctactcttgcaaccgttttgatgaacagaggatacaacgttgtcagtggtggaacggacaaccatctcgtactcgttagttttcttgacaaagattttagtgggaaagatgcggatgaagctttgggacgcgccggaattacggtcaacaaaaacaccgttcccggagagacaagaagtccgtttgttactagtggtatccggataggaagtccggctttgactgcaagaggtatgaaagaggctgaatttgaacttatagccaacaaaatcgcagatgttcttgataatattcacgatgtgaatctgcatgaaaagataaaagaggagatggtggctctagctcgtaagtttgtcatttacgacagaccgacctattaa

SEQ ID NO: 10152 - protein, 415 aa, Nitratiruptor sp. SB155-2
MDFLKNQDPAVYEIFEKELQRQTDHLEMIASENFTSPAVMEAMGSVFTNKYAEGYPGKRYYGGCEYADAIEELAIQRAKELFGCEFVNVQPHSGSQANQGVYLALLKPYDKILGMDLSHGGHLTHGAKVNASGKIYQSFFYGVNDEGWIDYDRVLDIAKIVKPKLIVCGASAYPRVIDFKKFREIADEVGALLMADIAHIAGLVAAGEHPSPFPYCDVVTTTTHKTLRGPRGGMIMTNDADIAKKINSAIFPGIQGGPLVHVIAAKAVGFGENLKPEWKEYAKQMRINASTLATVLMNRGYNVVSGGTDNHLVLVSFLDKDFSGKDADEALGRAGITVNKNTVPGETRSPFVTSGIRIGSPALTARGMKEAEFELIANKIADVLDNIHDVNLHEKIKEEMVALARKFVIYDRPTY

SEQ ID NO: 10153 - DNA, 1251 bp, Sulfurovum sp. NBC37-1
  CDS (1)..(1251): transl_table=11
atgtcatatgccatagaaacgtttgacccggagatattccaggcaattgaaaatgaaagagagagacagacgaaccacctcgagatgatcgcatccgaaaacttcactatccctgccgtcatggaggcgatgggttcggtctttaccaacaaatatgccgaaggatatccgcacaagagatactatggcggatgcgaatacgccgatgtggtagaacagcttgctatcgacagggcctgcgaactctttgactgcaactatgcaaatgtacagccccactccggctcacaggcgaacggtgccgtctatgcggcgctgatcaaagccggggacaaaatacttggtatggacctcagccacggcggtcacctcactcacggctcaaaacccagtttttccggcaaaaactaccacagctttacctacggtgtcgagcttgacgggcgcatcaactatgacagagtcatggagattgcaaagatcgtacaaccgaagatcatcgtctgcggtgcctctgcctatgccagagagatcgatttcaagaagttcagggagatcgccgatgaagtcggcgcgatcctctttgcggacatcgcacacattgcaggtctggtctgtgccggtgaacatccaagcccgttcccgtatgccgatgtggtcacaacaacgacacacaaaacacttgcaggacctcgtggcggtatgatcatgaccaacgatgaagacattgccaagaagatcaactctgccatcttcccgggtcttcaaggcgggccgcttgttcatgtaattgctgccaaggcagtcggtttcaaacacaacctctctgatgaatggaaagtctatgcaaaacaggtgaaagccaatgcttccatacttgcagacgtgctcatcaagagaggctacgacgtggtctccggcggaacagacaaccacctcgttcttgtctccttcctcgataaagaattctcagggaaagatgccgatgcggcactgggtgccgccggtatcaccgtgaacaagaacacggttccaggagagacaagaagcccgttcgtgacttcaggtatccgtatcggttcgcctgcattgacaagccgcggcatgaaagagatagagtttgagatcatcgccaacaagatcgctgatgtactcgacaatgtcaacgacagcgaactgcatgcaaagatcaaagaggaaatgaaggaacttgcttccaacttcgtgatctacgataagccgatatattaa

SEQ ID NO: 10154 - protein, 416 aa, Sulfurovum sp. NBC37-1
MSYAIETFDPEIFQAIENERERQTNHLEMIASENFTIPAVMEAMGSVFTNKYAEGYPHKRYYGGCEYADVVEQLAIDRACELFDCNYANVQPHSGSQANGAVYAALIKAGDKILGMDLSHGGHLTHGSKPSFSGKNYHSFTYGVELDGRINYDRVMEIAKIVQPKIIVCGASAYAREIDFKKFREIADEVGAILFADIAHIAGLVCAGEHPSPFPYADVVTTTTHKTLAGPRGGMIMTNDEDIAKKINSAIFPGLQGGPLVHVIAAKAVGFKHNLSDEWKVYAKQVKANASILADVLIKRGYDVVSGGTDNHLVLVSFLDKEFSGKDADAALGAAGITVNKNTVPGETRSPFVTSGIRIGSPALTSRGMKEIEFEIIANKIADVLDNVNDSELHAKIKEEMKELASNFVIYDKPIY

SEQ ID NO: 10155 - DNA, 1254 bp, Shewanella baltica OS185
  CDS (1)..(1254): transl_table=11
atgctgaaaaaagatatgaatatcgcagattatgatccggaactgtttaaggcaattcagaatgaaactctgcgtcaagaagagcatattgagctgattgcttctgaaaactacaccagtccacgcgtgatggaagcgcaaggttcacagttaaccaataagtatgctgaaggctatccaggcaagcgttactacggtggttgtgagtatgtggacgtagttgaaaccttagcgattgaacgtgcgaaagaactgtttagcgcaacttacgctaacgtacaacctcattcaggttcacaggcaaacagcgctgtttacatggcattgttaaaacctggcgataccgtactgggcatgaacttagcccacggtggtcacttaacccacggttcacccgttaacttctctggcaaactgtacaacatcattccttacggtatcgacgagtcaggtaaaattgactacgacgaaatggaacgtctggccgtagaacataagcctaagatgatgatcggcggtttctctgcctattcaggtatcgttgactgggcaaaaatgcgtgaaattgctgacaaaataggtgcttacctatttgtcgacatggcgcacgttgccggtcttattgctgctggcgtttatccaaacccagttccacacgcacacgttgtgacgtcaacgacccacaaaactttagccggtcctcgtggtggcgtgatcctgtctgctgctgacgatgaagacttgtacaagaagttgaattcagcggtatttccaggcggtcaaggcggcccattaatgcacgttatcgcaggtaaagcggttgcgttcaaagaagccctagagccagaatttaaagtgtaccaacagcaagtggttaacaacgctaaagctatggttgaagtgttccttgagcgcggttacaaaatcgtctctggcggaaccagcaatcacttgatgctagttgatctgattggtcgtgacttaacgggtaaagaagccgatgccgccttaggtagcgctaacattaccgtgaacaaaaactcagtgccaaacgacccacgttcaccctttgtgacctcaggtgtgcgtatcggtacgccagccattacgcgccgcggctttaaagaagcggaatcgaaagagctgactggctggatttgtgacatccttgatgatgctaacaatcctgcagtgattgagcgtgttaaaggccaagtattggcactgtgcgcacgtttccctgtttacggttaa

SEQ ID NO: 10156 - protein, 417 aa, Shewanella baltica OS185
MLKKDMNIADYDPELFKAIQNETLRQEEHIELIASENYTSPRVMEAQGSQLTNKYAEGYPGKRYYGGCEYVDVVETLAIERAKELFSATYANVQPHSGSQANSAVYMALLKPGDTVLGMNLAHGGHLTHGSPVNFSGKLYNIIPYGIDESGKIDYDEMERLAVEHKPKMMIGGFSAYSGIVDWAKMREIADKIGAYLFVDMAHVAGLIAAGVYPNPVPHAHVVTSTTHKTLAGPRGGVILSAADDEDLYKKLNSAVFPGGQGGPLMHVIAGKAVAFKEALEPEFKVYQQQVVNNAKAMVEVFLERGYKIVSGGTSNHLMLVDLIGRDLTGKEADAALGSANITVNKNSVPNDPRSPFVTSGVRIGTPAITRRGFKEAESKELTGWICDILDDANNPAVIERVKGQVLALCARFPVYG

SEQ ID NO: 10157 - DNA, 1242 bp, Clostridium botulinum F str. Langeland
  CDS (1)..(1242): transl_table=11
atggactttacaaatttaaaaaacacagatccagagctattagacatgataaagaaagaagaggaaagacaagaatataatatcgaattaatagcttcagaaaattttactagtttatctgtaatggaggctatgggatctttattgacaaataaatatgcagaaggatacccacataaaagatattatggaggatgtgaatttgtagatgaggtagaggatttagcaagagaaagattaaaaaaattatttgctgcagaacatgccaatgtacaaccacattctggttcacaagccaatatggcagtttatatgtctgtgcttcagactggtgatactatattaggtatggatttatcccatggcggacatttaacccatggaagtccagtaaatttttcaggaaaattatataattttatatcctatggtgtagataaagaaacagaaactatagattatgatcaattaaagaaaatagccttagaaaatagacctaaaatgatagtatctggagctagtgcttatcctagaattatagattttgaaaagataagagaaatttgtgatgaaatagatgcttatatgatggtagatatggctcatatagcaggattggtagctacaggattacatccatcaccagtaccttatgcagattttgtcacaacaactactcataaaactttaagaggacctagaggtggagctattttatgtaaagaaaaatatgcaaaagcagtagataaagctatattcccaggcattcaggggggcccattaatgcatactatagcagcaaaagctgtttgttttagggaagctttaagagaagattataaagaatatatgcagcaagttgttaaaaatactaaagttttaggagaagaattaaaaaattatggatttagactaatatctggtggtacagataaccatttattactaatagatttaactaataaaaatataacaggaaaagatgcagaaaaacttttagattcagtaggaattactgtgaataaaaatacaataccttttgaaactttaagcccttttataactagtggaattagaataggaactccagcggtaactacgagaggatttaaggaagaggaaatgaaaaaaatagcctatttcatgaattattctatagaacatagggaagagaatttatctcaaataaaagagcaaataaaagaaatttgtaaaaaatacccattgtatcaaaatgcataa

SEQ ID NO: 10158 - protein, 413 aa, Clostridium botulinum F str. Langeland
MDFTNLKNTDPELLDMIKKEEERQEYNIELIASENFTSLSVMEAMGSLLTNKYAEGYPHKRYYGGCEFVDEVEDLARERLKKLFAAEHANVQPHSGSQANMAVYMSVLQTGDTILGMDLSHGGHLTHGSPVNFSGKLYNFISYGVDKETETIDYDQLKKIALENRPKMIVSGASAYPRIIDFEKIREICDEIDAYMMVDMAHIAGLVATGLHPSPVPYADFVTTTTHKTLRGPRGGAILCKEKYAKAVDKAIFPGIQGGPLMHTIAAKAVCFREALREDYKEYMQQVVKNTKVLGEELKNYGFRLISGGTDNHLLLIDLTNKNITGKDAEKLLDSVGITVNKNTIPFETLSPFITSGIRIGTPAVTTRGFKEEEMKKIAYFMNYSIEHREENLSQIKEQIKEICKKYPLYQNA

SEQ ID NO: 10159 - DNA, 1254 bp, Yersinia pseudotuberculosis IP 31758
  CDS (1)..(1254): transl_table=11
atgttaaagcgtgaaatgaacattgccgattacgatgcagatctgtggcgtgcaatggagcaagaagtcgtgcgtcaggaagaacacatcgaactgattgcgtctgagaactacaccagcccgcgtgttatgcaagcgcagggatctcagttaacgaacaaatatgctgaaggctatccaggcaagcgttattacggtggctgtgaatatgttgatattgttgaacaattagcaatcgatcgtgctaaagcactatttggtgctgattacgcaaacgttcaacctcattctggttcacaagctaacgttgctgtttactctgcgttgctgaaacccggtgacaccgtattggggatgaatctggcacacggcggtcacttgacgcatggttcaccagtgaacttctccggcaaactctacaacatcgtcccttatggtattgatgagtcgggtcaaattgattatgaagatctggcacgtcaggcggaaatacataaaccaaaaatgattatcggtggcttctctgcctattctggtatcgttgattgggcaaaaatgcgtgaaattgccgacagcattgacgcatggttctttgttgatatggctcacgttgctggtctggttgctgcgggtgtttatcctaacccggttccacatgcccacatcgttaccaccacgacgcacaagactctggctggcccacgtggcggtttgattctggcgaaagggggcgatgaagacttgtacaaaaaactgaactcttctgttttccctggtaaccagggtggcccattgatgcatgttatcgcaggtaaagcggtcgcgctgaaagaagcaatggaacctgagtttaaaatttaccaacagcaagtggctaaaaatgcgaaagccatggtggcggtgttcttggagcgcggttacaaagtggtttctggtggtacggataaccacctgttcttgctagatttggtggataaagacatcaccggtaaagacgctgatgcggctttaggccgtgcgaatatcaccgtgaacaaaaacagcgtacctaacgatccgaagagcccgtttgtgacatctggtgtgcgtattggtagcccagcgatcacccgccgtggcttcaaagaagcggaatcccgtgaattggctggctggatgtgtgatgtgttagataacatcaacgatgaagcgaccattgagcgtgtgaaacagaaagttctggctatctgcgctcgtttaccggtttacgcataa

SEQ ID NO: 10160 - protein, 417 aa, Yersinia pseudotuberculosis IP 31758
MLKREMNIADYDADLWRAMEQEVVRQEEHIELIASENYTSPRVMQAQGSQLTNKYAEGYPGKRYYGGCEYVDIVEQLAIDRAKALFGADYANVQPHSGSQANVAVYSALLKPGDTVLGMNLAHGGHLTHGSPVNFSGKLYNIVPYGIDESGQIDYEDLARQAEIHKPKMIIGGFSAYSGIVDWAKMREIADSIDAWFFVDMAHVAGLVAAGVYPNPVPHAHIVTTTTHKTLAGPRGGLILAKGGDEDLYKKLNSSVFPGNQGGPLMHVIAGKAVALKEAMEPEFKIYQQQVAKNAKAMVAVFLERGYKVVSGGTDNHLFLLDLVDKDITGKDADAALGRANITVNKNSVPNDPKSPFVTSGVRIGSPAITRRGFKEAESRELAGWMCDVLDNINDEATIERVKQKVLAICARLPVYA

SEQ ID NO: 10161 - DNA, 1269 bp, Fervidobacterium nodosum Rt17-B1
  CDS (1)..(1269): transl_table=11
atgtgggaatttgttaagcagactgacccagaaatctacgaagttataatgaaagaatgggagaggcaggaatatggtttagaacttattgcatctgaaaattttgtttcgcccgcggtaatggaagccatggggagtgtattaacgaataagtacgcagagggatatccaaagaagaggtattacggtggctgtgaatgggttgacgttgcagaaaatttggcacgcgaaagagctaaaaaattattcaatgcaaaatatgcaaatgtccaaccacattcaggttcacaagcaaatatgggagcttatttcgcacttgctgaaccaggaagtacgttgatgggtatgtcgcttagccacggtgggcaccttacgcacggtgcaagtgtgaatttctcaggacaaatttacaaagtcgttcagtacggtgtcaatccacagactgaaaccatcgattacgatgaagtgagaaaacttgctttggagcataagccaaaaattatcgttgccggtggtagtgcttactcaagaattatcgatttcaaaaaatttagggaaatagcagatgaagttggtgcatatcttgttgttgatatggcacattttgcaggtcttgtggcagcaggaatatatccaaatccacttgaatatgcgcacgttgtgacgagtacaacacataagacgttaaggggacctcgtggtggattgatacttacaaatgatgaggaaatatataaggcgataaataaagcaatattcccaggtatacaaggtggacctttaatgcacgtaatagctgctaaagctgtttgcttcaaagaagcactctctgatgaatttaaagcttatcaaaatcaaattgttaagaacgctaaagcgcttgctaaagccctcgaaaatagaggattaagaattgtttctggaggtactgatacacacttgatgcttgttgatttgaatcctctcaatgttacaggtaaagcagctgaaacagcacttggatactgtcatattacagttaacaaaaacacaattccaaatgaaacaaggtcaccatttgtggcaagtggaattagacttggaacaccagcgctcacgacacgaggtatgaaagaagaacagatggaagaaattgctgatctcatcgttacggtgttgaaaaatgttaaggatgaggaaggaaatgtcgatgaggaagttgctaagagagtatcagatagggttatagagctttgtaaacaattcccattgtacgtaggaaaaatataa

SEQ ID NO: 10162 - protein, 422 aa, Fervidobacterium nodosum Rt17-B1
MWEFVKQTDPEIYEVIMKEWERQEYGLELIASENFVSPAVMEAMGSVLTNKYAEGYPKKRYYGGCEWVDVAENLARERAKKLFNAKYANVQPHSGSQANMGAYFALAEPGSTLMGMSLSHGGHLTHGASVNFSGQIYKVVQYGVNPQTETIDYDEVRKLALEHKPKIIVAGGSAYSRIIDFKKFREIADEVGAYLVVDMAHFAGLVAAGIYPNPLEYAHVVTSTTHKTLRGPRGGLILTNDEEIYKAINKAIFPGIQGGPLMHVIAAKAVCFKEALSDEFKAYQNQIVKNAKALAKALENRGLRIVSGGTDTHLMLVDLNPLNVTGKAAETALGYCHITVNKNTIPNETRSPFVASGIRLGTPALTTRGMKEEQMEEIADLIVTVLKNVKDEEGNVDEEVAKRVSDRVIELCKQFPLYVGKI

SEQ ID NO: 10163 - DNA, 1263 bp, Parvibaculum lavamentivorans DS-1
  CDS (1)..(1263): transl_table=11
atgacgacctcacaggaacgagcccggctcgcccaatccgacaatgaaatctttctcgcgctcaagggcgaggaagcgcggcaacgcgcgggcctcgaactcatcccgtcggaaaactacgccttccccgaagtgctgacgctgctcggctccgccttcaccaataaatattcggaaggctatcccgggcggcgctattacggcggacaggactatacagaccgtatcgaaacgctggcccgcgacagggccaaggctctcttccgcgcggagcacgcgaatgtgcagccgctgtccggctcgccgatgaaccaggcagtctatctcggcctgctcgagcccggcgatacgatccttgcgatggatctcagccatggcggtcatctcacgcatggcgcgccggtcagccatatgggccgcctcttcaatttcgtgcgctacaagacggaccccacgaacggcgccatcgacttcgaccacctccgtgccgtcgcacgggagacgaagccgaggctcgtcgtctgtggctactcttcttacccgcgcgactacgactacgcggatttcaaacgcgttgccgacgaagtgggcgcgctcaccatggcggatgtttcccatatcggcgggctcatcgcggccaacgtcatgcgcaacccgctggatgcgggcttcgacgtgatgacgacgacgacgcacaagtcgctgcgcggcccgcgcggcgggctcattctctgcaaggctgagttcgcgaggaagatcgacgcttccgtgttccccggccttcagggcggtccgcatatgaatcaggtcgcggcagccgccgtcaccttccgcctcgccgccatgcccgcgttccgcgattacgcggaacaggtcctcgccaacgccaaggcgctcgccgctgcactcatggaacgtcaggtgaagctcgtcaccggcggcaccgacaatcacctcctcgtcatcgacacggtcgcgagtttcggcatcgacggcgcggtggcgcaggaggcgctcgaccgcgtcggcctcaccaccaacaaacaggtgatcccggacgatccgaacccgccgatgcgcccgtccggccttcgtctcggcacaccggcagcaacggcgcgcggcatggggcacaaggaaatggcggagatagccgaaatcatcgccgccgcgctcaacgcgaaaggagacgccgcaacggagacagcgctcgccgcccgcacgcacaagctcacttcgcgcttccccgtggacgggctctag

SEQ ID NO: 10164 - protein, 420 aa, Parvibaculum lavamentivorans DS-1
MTTSQERARLAQSDNEIFLALKGEEARQRAGLELIPSENYAFPEVLTLLGSAFTNKYSEGYPGRRYYGGQDYTDRIETLARDRAKALFRAEHANVQPLSGSPMNQAVYLGLLEPGDTILAMDLSHGGHLTHGAPVSHMGRLFNFVRYKTDPTNGAIDFDHLRAVARETKPRLVVCGYSSYPRDYDYADFKRVADEVGALTMADVSHIGGLIAANVMRNPLDAGFDVMTTTTHKSLRGPRGGLILCKAEFARKIDASVFPGLQGGPHMNQVAAAAVTFRLAAMPAFRDYAEQVLANAKALAAALMERQVKLVTGGTDNHLLVIDTVASFGIDGAVAQEALDRVGLTTNKQVIPDDPNPPMRPSGLRLGTPAATARGMGHKEMAEIAEIIAAALNAKGDAATETALAARTHKLTSRFPVDGL

SEQ ID NO: 10165 - DNA, 1356 bp, Xanthobacter autotrophicus Py2
  CDS (1)..(1356): transl_table=11
atgcgtcccgccggggtgccccgacattaccggagacctgccatggcctcgcaggacgcgaaccgctcctccatttcggaggaaatgaaccgcttcttcactgcccctctcgccgagagcgatcccgagatcgccggcgcggtgaaggcggagctgggtcgccagcgcgacgagatcgagctgatcgcgtccgagaacatcgtctcgcgcgccgtgctcgaggcccagggctccgtgctcaccaacaagtatgccgagggctatccgggcaagcgctactacggcggctgccagttcgtggacgtggcggaaaacctcgccatcgagcgcgccaagaagctgttcggctgcggcttcgccaacgtccagcccaattccggcagccaggccaaccagggcgtgttcttcgccctgctgcagccgggcgatacctttctgggcctcaaccttgccgccggcggtcacctgacccacggctcgccggtcaacatgtccggcaagtggttcaagcccgtgccctacacggtgcgcgaggacgatcagcgcatcgactatgacgaggtggcgcggctcgccgacgagcacaagcccaagctcatcgtggccggcggctcggcctacccgcgcgtcatcgatttcccgaagatgcgcgccatcgccgacagcgtgggcgccaagctcatggtggacatggcgcattttgccggtctcgtcgccggtggcgcccacccgagcccgttcccccacgcccatgtggtgaccaccaccacccacaagaccctgcgtgggccgcgcggcggcatgatcctcaccaatgacgaggacctggccaagaagatcaattcggccatcttccccggcatccagggcgggccgctgatgcatgtcatcgctgccaaggcggtggccttcggcgaggcgctgcgccccgagttcaagctctatgcgaagaacgtggtggagaatgccaaggcgctggccgagaccctgaagggccacggcttcaacatcgtctccggtggcaccgacacccacctgatgctggtggacctgcgccccaagcgcctcaccggcaagacctcggaaggcgcgctgggccgggcgcacatcaccaccaacaagaacggcatcccgttcgatcccgagaagccgttcgtgacctccggcatccgcctcggcacgccggcctgcaccacgcgcggcttcggggtggccgagttccagcaggtgggcgacttcatcgccgaggtgctcgacgtgctctcccagaagggcgtggacgaggattcgctggtggaagccacggtgcgtgagaaggtctcgggcctgctcgcccgcttccccatctatccctga

SEQ ID NO: 10166 - protein, 451 aa, Xanthobacter autotrophicus Py2
MRPAGVPRHYRRPAMASQDANRSSISEEMNRFFTAPLAESDPEIAGAVKAELGRQRDEIELIASENIVSRAVLEAQGSVLTNKYAEGYPGKRYYGGCQFVDVAENLAIERAKKLFGCGFANVQPNSGSQANQGVFFALLQPGDTFLGLNLAAGGHLTHGSPVNMSGKWFKPVPYTVREDDQRIDYDEVARLADEHKPKLIVAGGSAYPRVIDFPKMRAIADSVGAKLMVDMAHFAGLVAGGAHPSPFPHAHVVTTTTHKTLRGPRGGMILTNDEDLAKKINSAIFPGIQGGPLMHVIAAKAVAFGEALRPEFKLYAKNVVENAKALAETLKGHGFNIVSGGTDTHLMLVDLRPKRLTGKTSEGALGRAHITTNKNGIPFDPEKPFVTSGIRLGTPACTTRGFGVAEFQQVGDFIAEVLDVLSQKGVDEDSLVEATVREKVSGLLARFPIYP

SEQ ID NO: 10167 - DNA, 1248 bp, Bacillus amyloliquefaciens FZB42
  CDS (1)..(1248): transl_table=11
atgaaacatttacctgtacaagacaaacaagtgtttaacgccatcaaagatgagcgtaagcgtcaacagactaagatcgaattaattgcttctgaaaacttcgtgacggaagcggtaatggaagcacaaggctctgttttaacaaacaaatatgctgaaggctaccccggcaaacgctactacggcggctgtgagcatgttgatgtcgttgaggacatcgcccgcgaccgcgcgaaagagattttcggagctgagcatgtaaacgttcagccgcactcaggcgctcaagcgaacatggctgtttacttcacgattttagagcacggcgacacggtgctcgggatgaacctctcccacggcggccacttaacacacggaagcccggttaatttcagcggtgttcaatacaactttgtagaatacggtgtcgataaagacacgcaatatatagattatgaagatgtgcgtgaaaaagcgctggcgcataagccgaaactcatcgttgccggagcgagcgcgtacccccgcacgatcgactttaaaaaattccgcgaaatcgctgatgaagtcggcgcttacttcatggtagacatggcgcatatcgcgggtcttgtcgcagccggccttcatccgaatccggttccttacgctgactttgtaacgacaacgactcacaaaacacttcgcggacctcgcggaggaatgattctttgccgtgaagagttcggcaaaaagattgataaatccattttcccgggaatccaaggcggaccgcttatgcatgtcatcgcggccaaagccgtttctttcggagaagtgcttgaagatgatttcaaaacatatgcgcaaaacgtcatctcgaacgcgaaaagcctggctgagtctctgaacaaagagggcattcagctcgtatcgggcggaacggataaccaccttgtgcttgtcgacctccgttctctcggtctgaccggaaaagtcgctgaacacgttcttgatgaaatcggcattacatctaataaaaacgcgatcccttacgatccggaaaaaccgttcgtcacaagcggaatccgtctcggtacggcagctgtgacaagccgcggctttgacggtgacgcgcttgaagaagtcggcgccatcatcggcctcgcgctgaaacatcatgaagacgaagcaaaacttgaagaagcgagacagcgcgtatctgccttgactgaaaagtttcctttatataaagaactaggctattaa

SEQ ID NO: 10168 - protein, 415 aa, Bacillus amyloliquefaciens FZB42
MKHLPVQDKQVFNAIKDERKRQQTKIELIASENFVTEAVMEAQGSVLTNKYAEGYPGKRYYGGCEHVDVVEDIARDRAKEIFGAEHVNVQPHSGAQANMAVYFTILEHGDTVLGMNLSHGGHLTHGSPVNFSGVQYNFVEYGVDKDTQYIDYEDVREKALAHKPKLIVAGASAYPRTIDFKKFREIADEVGAYFMVDMAHIAGLVAAGLHPNPVPYADFVTTTTHKTLRGPRGGMILCREEFGKKIDKSIFPGIQGGPLMHVIAAKAVSFGEVLEDDFKTYAQNVISNAKSLAESLNKEGIQLVSGGTDNHLVLVDLRSLGLTGKVAEHVLDEIGITSNKNAIPYDPEKPFVTSGIRLGTAAVTSRGFDGDALEEVGAIIGLALKHHEDEAKLEEARQRVSALTEKFPLYKELGY

SEQ ID NO: 10169 - DNA, 1311 bp, Roseiflexus castenholzii DSM 13941
  CDS (1)..(1311): transl_table=11
atgtctatgcttcagaccctctggcgcagtgatcctgccgttgcgcgcattatcgatggcgagatgcgccgtcagcgcgacggattggaactgattgccagcgaaaactatgccagtcgcgccgtgatggaagcacagggttcagcgctcacgaacaaatatgccgaaggatatccgggcgcacgctactacggcggctgcgaatgggtcgatcaggtggaagacctggcgcgcgcgcgggtcaaagagttgttcggcgcagaatatgcaaatgtgcagccgcactccgggtcacaggcgaacatggccgtctacttcacttttctgcgacccggtgataaggtgctcggcatgaatctggcgcacggcgggcacctgactcatggctccccggttaacttttcgggtcagttgtacaccttcgtggcgtatggcatcgatcccaagaccgaacggatcgattacgatcaggtggcagagattgcgcgccgcgagcgccccaaaatgatcacggtcggcgccagcgcctattcgcgtgccatcgattttgccatcttccgtcagatcgccgatgaagtcggcgcgtttctcttcgccgatattgcgcaccctgccgggttgatcgccaaagggttgctgcctagccccatcccctacgctcacgtcgttacctcgaccacccacaagacgctgcgcgggccacgcggcggcatcatcatgatggggaaggactttgagaacccattcgggttgaaggcagcgaagagcggtcgcaccctgatgatgtcggaactgctcgacaaaatggtcatccccggtgtgcagggcggtcccttgatgcacgtcatcgctgccaaagcggtcggattcggcgaaaacctgcaaccggagttcgagacgtatgcccgtcagattatccgcaatgcgcagacactggcaggcgccctgatggcgcgtggataccacatcctctccggcggcaccgacaaccacctgatgcttatcgacctgcgcaacaagggagtgagcggcaaggcggcgcaggaggcgctcgaccgcgccgccatcacgaccaataagaatgccgtccccaacgacgacaaatcgccattgatcaccagtggcattcggctgggaacccctgcactgaccacccgcggcatgaaggaaccggagatggaacagattgcggcactgatcgacgatgtcatcacgcatatcaatgacgatcataccatcaatcgggtgcgcgaagaggtgttcgcgctctgcgcgcgcttcccggtgccggggctggaaccatccgcctga

SEQ ID NO: 10170 - protein, 436 aa, Roseiflexus castenholzii DSM 13941
MSMLQTLWRSDPAVARIIDGEMRRQRDGLELIASENYASRAVMEAQGSALTNKYAEGYPGARYYGGCEWVDQVEDLARARVKELFGAEYANVQPHSGSQANMAVYFTFLRPGDKVLGMNLAHGGHLTHGSPVNFSGQLYTFVAYGIDPKTERIDYDQVAEIARRERPKMITVGASAYSRAIDFAIFRQIADEVGAFLFADIAHPAGLIAKGLLPSPIPYAHVVTSTTHKTLRGPRGGIIMMGKDFENPFGLKAAKSGRTLMMSELLDKMVIPGVQGGPLMHVIAAKAVGFGENLQPEFETYARQIIRNAQTLAGALMARGYHILSGGTDNHLMLIDLRNKGVSGKAAQEALDRAAITTNKNAVPNDDKSPLITSGIRLGTPALTTRGMKEPEMEQIAALIDDVITHINDDHTINRVREEVFALCARFPVPGLEPSA

SEQ ID NO: 10171 - DNA, 1260 bp, Cronobacter sakazakii ATCC BAA-894
  CDS (1)..(1260): transl_table=11
atgcggatgttaaagcgtgaaatgaacattgccgattatgatgccgaactgtggcaggctatggagcaggaaaaagtacgtcaggaagagcacatcgaactgatcgcctccgaaaactacaccagcccgcgcgtgatgcaggcgcagggctctcagctgaccaacaaatatgccgaaggttatccgggcaagcgctactacggcggctgcgaatatgtggatatcgttgagcaactggcgattgaccgcgcgaaagaactcttcggcgctgactacgctaacgtgcagccgcactccggttcccaggccaacttcgcggtctataccgcgctgctacaaccgggcgataccgttcttggtatgaacctggcgcagggcggccacctgacccacggctccccggttaacttctccggtaagctctacaacatcattccttacggtatcgacgagtccggcaaaatcgattacgaggatatggcgaagcaggcgaaagagcacaaaccgaaaatgatcatcggtggtttctccgcgtactccggcatcgttgactgggcaaaaatgcgtgaaatcgccgacagcatcggcgcatacctgttcgtcgatatggcgcacgtggcgggcctgattgccgcaggcgtctacccgaacccggttccgcacgcgcacgtcgtcaccacgaccacccacaaaacgctcgctggcccgcgcggcggtctgatcctcgccaaaggcggcagcgaagagctgtacaaaaaactgaactctgccgtgttcccgagcgcgcagggcggcccgctgatgcacgttatcgctgcgaaagcggtcgcgctgaaagaagcgatggagccggagttcaaaacctaccagcagcaggtggccaaaaacgccaaagcgatggtggaagtgttcctgaaccgcggctacaaagtggtttccggcggtacggaaaaccacctgttcctgctggatctggttgataaaaacctgaccggtaaagaagcggacgccgcacttggccgcgccaacatcaccgttaacaaaaacagcgtgccgaacgatccgaagagcccgttcgtcacctccggcatccgtatcggttctccggcggtcacacgtcgcggctttaaagaagccgaagttaaagagctggcaggctggatgtgcgacatcctggataacatcaatgacgaagcggttatcgagcgcgtcaaaggtaaagtactggatatctgcgcacgcttcccggtttacgcgtaa

SEQ ID NO: 10172 - protein, 419 aa, Cronobacter sakazakii ATCC BAA-894
MRMLKREMNIADYDAELWQAMEQEKVRQEEHIELIASENYTSPRVMQAQGSQLTNKYAEGYPGKRYYGGCEYVDIVEQLAIDRAKELFGADYANVQPHSGSQANFAVYTALLQPGDTVLGMNLAQGGHLTHGSPVNFSGKLYNIIPYGIDESGKIDYEDMAKQAKEHKPKMIIGGFSAYSGIVDWAKMREIADSIGAYLFVDMAHVAGLIAAGVYPNPVPHAHVVTTTTHKTLAGPRGGLILAKGGSEELYKKLNSAVFPSAQGGPLMHVIAAKAVALKEAMEPEFKTYQQQVAKNAKAMVEVFLNRGYKVVSGGTENHLFLLDLVDKNLTGKEADAALGRANITVNKNSVPNDPKSPFVTSGIRIGSPAVTRRGFKEAEVKELAGWMCDILDNINDEAVIERVKGKVLDICARFPVYA

SEQ ID NO: 10173 - DNA, 1251 bp, Vibrio harveyi ATCC BAA-1116
  CDS (1)..(1251): transl_table=11
atgcttaagcgtgatatgaacatcgcagattacgatgcggaactgttcgcagctatccaggaagaaacacttcgccaggaagaacacattgaactaatcgcttctgaaaactacacaagtccacgtgtaatggaagctcaaggttctcagctaacgaacaaatacgctgaaggctacccaggcaagcgttactacggcggttgtgagtacgtagataaagctgaagcactggcaatcgatcgtgcatgccaactgttcggttgtgagtacgcgaacgtacagcctcactcaggttctcaagcaaacagcgcagtttacatggcgcttctaaacccaggcgacacagttctaggtatgagcctagcgcacggtggtcacctaactcacggttctccagtaaacttttctggtaagcactacaacgtgattccttacggtatcgacgaagcaggtaaaatcaactacgacgagatggaacagctagcgcttgagcacaagcctaagatgatcatcggtggtttctctgcttactcacaaatcgttgattggaaacgcatgcgtgaaatcgcagacaaagttgacgcttacctattcgtagacatggcacacgttgctggtctaatcgcagcaggtgagtacccaacaccagttccacacgctcacgtagtaacaacgactacgcacaaaacgctagcaggtcctcgtggcggtcttatcctttctaacgaaggtgaagagctttacaagaagctgaactcagcagtattccctggcggtcaaggtggtcctctaatgcacgttatcgctggtaaagcggtagcgttcaaagaagcgatggagcctgaattcaaagcttaccaagctaacgtagtgaaaaacgcgaaagcaatggttggtcaattccaagagcgtggctacaagatcgtttctaacggtactgagaaccacctattcctagttgacctaatcgacaaagacatcactggtaaagatgcagatgcagcactaggtgcagcaaacatcacagtaaacaagaactctgttccaaacgatccacgcagcccattcgtaacgtctggtatccgtgttggtacgccagcaattactcgtcgcggcttcactgaagatgacgcgaaagagctagcaaactggatgtgtgacgttctagataacatcggcaacgaagaagttatcgaagcgacaaaacagaaagttctagaaatctgtaagcgtctaccagtttacgcgtaa

SEQ ID NO: 10174 - protein, 416 aa, Vibrio harveyi ATCC BAA-1116
MLKRDMNIADYDAELFAAIQEETLRQEEHIELIASENYTSPRVMEAQGSQLTNKYAEGYPGKRYYGGCEYVDKAEALAIDRACQLFGCEYANVQPHSGSQANSAVYMALLNPGDTVLGMSLAHGGHLTHGSPVNFSGKHYNVIPYGIDEAGKINYDEMEQLALEHKPKMIIGGFSAYSQIVDWKRMREIADKVDAYLFVDMAHVAGLIAAGEYPTPVPHAHVVTTTTHKTLAGPRGGLILSNEGEELYKKLNSAVFPGGQGGPLMHVIAGKAVAFKEAMEPEFKAYQANVVKNAKAMVGQFQERGYKIVSNGTENHLFLVDLIDKDITGKDADAALGAANITVNKNSVPNDPRSPFVTSGIRVGTPAITRRGFTEDDAKELANWMCDVLDNIGNEEVIEATKQKVLEICKRLPVYA

SEQ ID NO: 10175 - DNA, 1260 bp, Citrobacter koseri ATCC BAA-895
  CDS (1)..(1260): transl_table=11
atgcggatgttaaagcgtgaaatgaacattgccgattatgatgccgaactgtggcaggctatggagcaggaaaaagtacgtcaggaagagcacatcgaactgatcgcctccgaaaactacaccagcccgcgcgtgatgcaggcgcaggggtctcagctgaccaacaaatacgctgaaggatatccgggcaagcgctactacggcggttgcgaatatgtggatgtcgttgagcaactggcgattgaccgcgcgaaagaactgtttggcgcagactacgccaacgtccagccgcactctggttctcaggctaacttcgcggtctacactgcgctgctgcaaccgggcgacaccgttctgggtatgaacctggcgcaaggtggccacctgactcacggttctccggtaaacttctccggtaaactgtacaacatcgtgccttacggcatcgatgagtccggtaaaattgactacgaagagatggcgaagctggctcagactcataaaccgaagatgatcatcggcggcttctctgcttattccggcgtcgttgactgggcaaaaatgcgtgaaattgccgacagcattggcgcgtacctgtttgttgatatggcgcacgtcgcgggtcttatcgccgcagacgtttatccgaacccggttccgcatgctcacgttgtgaccaccaccacgcacaaaaccctggcgggtccgcgcggcggcctgatcctggcgaaaggcggtgacgaagagttgtacaaaaaactgaactctgccgttttccctagtgctcagggtggcccgctgatgcatgtgatcgccggtaaagcggtggcgctgaaagaagcgatggaaccggagttcaaagtctaccagcagcaggttgccaaaaacgccaaagcgatggtggaagtgttcctgaaccgtggctacaaagtggtttccggcggtacggagaaccacctgttcctgctggatctggtggacaaaaacctgaccggtaaagaagctgacgccgcgctgggtcgtgccaacatcaccgttaacaaaaacagcgtgccgaacgatccgaagagcccgtttgttacttccggtatccgtatcggttctccggccattacgcgtcgcggctttaaagaagcagaagccaaagagctggctggctggatgtgcgatgtgctggacaacatcaacgatgaagcggttatcgagcgcatcaaaggcaaagtgctggacatctgcgcacgcttccctgtttacgcgtaa

SEQ ID NO: 10176 - protein, 419 aa, Citrobacter koseri ATCC BAA-895
MRMLKREMNIADYDAELWQAMEQEKVRQEEHIELIASENYTSPRVMQAQGSQLTNKYAEGYPGKRYYGGCEYVDVVEQLAIDRAKELFGADYANVQPHSGSQANFAVYTALLQPGDTVLGMNLAQGGHLTHGSPVNFSGKLYNIVPYGIDESGKIDYEEMAKLAQTHKPKMIIGGFSAYSGVVDWAKMREIADSIGAYLFVDMAHVAGLIAADVYPNPVPHAHVVTTTTHKTLAGPRGGLILAKGGDEELYKKLNSAVFPSAQGGPLMHVIAGKAVALKEAMEPEFKVYQQQVAKNAKAMVEVFLNRGYKVVSGGTENHLFLLDLVDKNLTGKEADAALGRANITVNKNSVPNDPKSPFVTSGIRIGSPAITRRGFKEAEAKELAGWMCDVLDNINDEAVIERIKGKVLDICARFPVYA

SEQ ID NO: 10177 - DNA, 1257 bp, Shewanella sediminis HAW-EB3
  CDS (1)..(1257): transl_table=11
atgctgaaaaaagatatgaatatcgcggactttgatccacaactgtttcaagcgattgcagatgaaactcgtcgtcaggaagagcacatcgaacttatcgcttcagaaaactacaccagtccacgtgttctggaagctcaaggttctcagctaaccaataaatacgccgaaggttatccgggtaagcgttattacggtggttgtgagcacgtagacattgcagaagaactcgcaatttctcgcgccaaagagctatttggtgctacctatgccaacgtacagcctcactcaggttctcaggctaactcagctgtatttatggcactgcttcaaggtggcgatacggtattgggtatgagcttagctcacggtggtcacttaactcatggttcacatgtgagtttttctggcaagctatataatgccgttcagtacgggatcgatgaggcgacaggcaagattgattacgccgaagttgagcgtcttgccgttgagcacaagcctaagatgatcatcgcaggtttcagtgcttactcaggtatcatcgactggggcaagttccgtgaaatcgccgacaaagtaggggcttacctgtttgttgatatggctcacgttgcaggcctggttgctgccggcatctacccgaatccactcccgcacgctcacgttgtaacgacgacaactcacaagacgcttgccggtccccgtggtggtttgatcctatctgcttgcgatgatgaagctatttataaaaagctgaactcagccgttttccctggtggtcagggcggtcctttgatgcacgttatcgctgctaaagcggttgcgtttaaagaagcactcgagccggagtttactgcttatcaggagcaggtcgttgtgaacgcgaaggctatggctaagacgtttatcgagcgtggctatgatgtcgtttctggtggtacagacaaccatctgtttttacttgatttgataagcaaagatatcacaggtaaagacgccgatgctgccttaggacttgctaatatcacggttaataagaactcagttcccaatgatccgcgttctccgtttgtgacttcgggtcttcgtatcggctctccggcaataactcgtcgtggcttcaaagaggagcagtcggttgagttgactaattggatgtgtgatgtacttgatgacatcacagatcaaggcacgattgagcgtgttaagaatcaggtgcttgaattgtgcgccaggttccctgtttacggttaa

SEQ ID NO: 10178 - protein, 418 aa, Shewanella sediminis HAW-EB3
MLKKDMNIADFDPQLFQAIADETRRQEEHIELIASENYTSPRVLEAQGSQLTNKYAEGYPGKRYYGGCEHVDIAEELAISRAKELFGATYANVQPHSGSQANSAVFMALLQGGDTVLGMSLAHGGHLTHGSHVSFSGKLYNAVQYGIDEATGKIDYAEVERLAVEHKPKMIIAGFSAYSGIIDWGKFREIADKVGAYLFVDMAHVAGLVAAGIYPNPLPHAHVVTTTTHKTLAGPRGGLILSACDDEAIYKKLNSAVFPGGQGGPLMHVIAAKAVAFKEALEPEFTAYQEQVVVNAKAMAKTFIERGYDVVSGGTDNHLFLLDLISKDITGKDADAALGLANITVNKNSVPNDPRSPFVTSGLRIGSPAITRRGFKEEQSVELTNWMCDVLDDITDQGTIERVKNQVLELCARFPVYG

SEQ ID NO: 10179 - DNA, 1254 bp, Serratia proteamaculans 568
  CDS (1)..(1254): transl_table=11
atgttaaagcgtgaaatgaacattgctgattacgatgccgaactgtggcgtgcaatggagcaagaagttgtgcgtcaggaagagcacattgagctgattgcgtctgagaactacaccagcccgcgcgtaatgcaggcccagggctcccagttgaccaacaaatacgctgaaggttatccgggcaagcgttattacggcggctgcgaatatgtggatatcgttgagcaactggccatcgatcgcgcaaaagagctgttcggcgcagattacgccaacgtccagccacactccggttcccaggcgaacttcgctgtttacaccgcgctgctgcagccgggcgacaccattctgggcatgaacctggcgcacggcggccacctgacccacggttcaccggtcaacctgtctggtaaactgtataacgtggtgccttacggcatcgacgaaaaaggtcaaatcgactacgaagatctggcgaaacaggcacagactcataaaccaaaaatgatcatcggcggcttctctgccttctccggtatcgttgattgggcaaaaatgcgcgaaatcgccgacagcatcggcgcttacctgttcgttgacatggcgcacgtagcgggtctgatcgccgccggcgtttatccgaacccggtccctcacgcacatatcgtgaccaccaccacccacaaaaccctggcaggtccgcgcggcggcctgatcctggcgaaaggcggtgatgaagatctgtataaaaagctgaactccgcggtgttcccgggcggccagggcggcccgctgatgcacgtgatcgccggtaaagcggtggcgctgaaagaagccatggagcctgagttcaaaatttaccagcagcaagtggccaaaaacgccaaagccatggtggaagtggtgctggagcgcggctacaaagtggtttccggtggcactcataaccacctgttcctgctggatctggttgataagaacctgaccggtaaagaagctgacgctgccctgggccgcgccaacattaccgtgaacaaaaacagcgtgccaaacgatcccaagagcccgttcgtcacctccggtgtgcgtatcggtactccggcagtgacccgtcgcggcttcaaagaagctgacgtgcgtgaactggccggctggatctgcgacgtgctggacaacatcaacgatgaagccaccatcgaacgcaccaagaagaaagtactggatatctgcgcccgcctgccggtttacgcataa

SEQ ID NO: 10180 - protein, 417 aa, Serratia proteamaculans 568
MLKREMNIADYDAELWRAMEQEVVRQEEHIELIASENYTSPRVMQAQGSQLTNKYAEGYPGKRYYGGCEYVDIVEQLAIDRAKELFGADYANVQPHSGSQANFAVYTALLQPGDTILGMNLAHGGHLTHGSPVNLSGKLYNVVPYGIDEKGQIDYEDLAKQAQTHKPKMIIGGFSAFSGIVDWAKMREIADSIGAYLFVDMAHVAGLIAAGVYPNPVPHAHIVTTTTHKTLAGPRGGLILAKGGDEDLYKKLNSAVFPGGQGGPLMHVIAGKAVALKEAMEPEFKIYQQQVAKNAKAMVEVVLERGYKVVSGGTHNHLFLLDLVDKNLTGKEADAALGRANITVNKNSVPNDPKSPFVTSGVRIGTPAVTRRGFKEADVRELAGWICDVLDNINDEATIERTKKKVLDICARLPVYA

SEQ ID NO: 10181 - DNA, 1245 bp, Campylobacter jejuni subsp. jejuni 81116
  CDS (1)..(1245): transl_table=11
atgagtttagaaatgtttgataaagaaatttttgatttaacaaacaaagagttagagcgtcaatgcgaaggtcttgaaatgatagcgagtgaaaatttcactttacctgaagtaatggaagttataggaagtatcttgacgaacaaatacgcagaaggttatccaggtaaaagatattatggtggttgtgaatttgttgatgagattgaaactctagctattgaaagatgtaaaaaactttttaattgtaaatttgctaatgttcagcctaattcaggttctcaagctaatcaaggtgtttatgcggctttgattaatccaggtgataaaattttaggaatggatttaagtcatggtggacatttaactcatggtgcaaaagtaagttcttcgggtaaaatgtacgaaagttgtttttacggcgtagaacttgatggaagaattgattatgaaaaagtaagagaaatcgctaagaaagaaaagccaaaattaatagtttgtggagctagtgcttatgcaagagtgattgattttgctaaatttagagaaattgctgatgaaataggtgcctatctttttgctgatatagcacatattgcaggtcttgttgtggcaggcgagcatccaagtccttttccgcacgctcatgtagtaagctcaaccacacataaaactttgcgtggtccaagaggtggtattattatgacaaatgatgaagagcttgctaaaaaaattaattctgccatttttccaggtattcaaggtggtcctttgatgcatgtaattgctgcaaaagcagtaggatttaaatttaatcttagcgatgagtggaaagtttatgcaaaacaagtaagaaccaatgctcaagttttagctaatgttttaatggatagaaaatttaaacttgttagcgatggaacggataatcaccttgttttaatgagttttttagatcgtgaatttagtggaaaagatgcagatttagctcttggaaatgcaggtattactgcaaataaaaataccgttccaggagagattagaagtccttttatcacaagtggattaagacttggaactccagcgcttactgccagaggttttaaagaaaaagaaatggaaattgtgtcaaattatattgcagatattttagatgatattaataatgaaaaattacaagagaatattaaacaagaattaaaaaaacttgcaagtaattttattatttatgaaagggctatgttttga

SEQ ID NO: 10182 - protein, 414 aa, Campylobacter jejuni subsp. jejuni 81116
MSLEMFDKEIFDLTNKELERQCEGLEMIASENFTLPEVMEVIGSILTNKYAEGYPGKRYYGGCEFVDEIETLAIERCKKLFNCKFANVQPNSGSQANQGVYAALINPGDKILGMDLSHGGHLTHGAKVSSSGKMYESCFYGVELDGRIDYEKVREIAKKEKPKLIVCGASAYARVIDFAKFREIADEIGAYLFADIAHIAGLVVAGEHPSPFPHAHVVSSTTHKTLRGPRGGIIMTNDEELAKKINSAIFPGIQGGPLMHVIAAKAVGFKFNLSDEWKVYAKQVRTNAQVLANVLMDRKFKLVSDGTDNHLVLMSFLDREFSGKDADLALGNAGITANKNTVPGEIRSPFITSGLRLGTPALTARGFKEKEMEIVSNYIADILDDINNEKLQENIKQELKKLASNFIIYERAMF

SEQ ID NO: 10183 - DNA, 1263 bp, Arcobacter butzleri RM4018
  CDS (1)..(1263): transl_table=11
atgagatatataacagaagcgaagttaaaagaggcagatgtagaagtatataatatcatagaagaggagttgaaaagacaaacaactcacttagagatgatagcaagtgagaatttcacatctccagcagtaatggaagcaatgggaagtgtatttacaaataaatatgcagaaggttatccatataaaagatattatggaggatgtgaacaagctgataaagtagaacaattagcaattgatagagcttgtgaaatatttggatgtaaatatgcaaatgttcaaccacactcaggaagccaagcaaatggagcagtatatgctgcattaataaaagctggtgataaaatcttaggtatggatttatctcatggtggacatttaactcatggttctaaaccatcattctctggacaaaattatcaagcattctattatggagttgaacttgatggaagaattaattatgataaagttgaagagatagcaaaaatagttcaaccaaaaataatcgtttgtggtgcttctgcatatgcaagagaaattgatttcaaaagatttagagaaatagcagatttggttggtgctattttatttgcagatattgcacatattgcaggtcttgtagcagctaatgaacatccaagtccatttcctcatgcacatatagttacaactactactcataagactttaagaggtccaagaggtggtatgataatgacaaatgatgaagagatagctaaaaaaataaactcagctattttcccaggacttcaaggtggaccacttgttcatgtaatagcagcaaaagcagtagcatttaaagagatacttgatccaaaatggaaagactatgcaaaacaagtaaaagcaaatgcaagagtgttaggagaagttctaacaaaaagaggatatgatatagtaagtggtggaacagataatcacttagtattagtaagttttttaaataaaccattttcagggaaagatgcagatgcagctttaggaaatgctggtattacagtaaataagaatacagtaccaggagagacaagaagtccatttgtaacatcagggattagaataggatctccagcattaacagcacgagggatgaaagaaaaagagtttgaattaatagcaaacaaaatatgtgatgtattagatgacataaataacactagtttacaagctaagattagcaaagagttagaggaattatctagcaattttgttatttataatcaagcttcatattaa

SEQ ID NO: 10184 - protein, 420 aa, Arcobacter butzleri RM4018
MRYITEAKLKEADVEVYNIIEEELKRQTTHLEMIASENFTSPAVMEAMGSVFTNKYAEGYPYKRYYGGCEQADKVEQLAIDRACEIFGCKYANVQPHSGSQANGAVYAALIKAGDKILGMDLSHGGHLTHGSKPSFSGQNYQAFYYGVELDGRINYDKVEEIAKIVQPKIIVCGASAYAREIDFKRFREIADLVGAILFADIAHIAGLVAANEHPSPFPHAHIVTTTTHKTLRGPRGGMIMTNDEEIAKKINSAIFPGLQGGPLVHVIAAKAVAFKEILDPKWKDYAKQVKANARVLGEVLTKRGYDIVSGGTDNHLVLVSFLNKPFSGKDADAALGNAGITVNKNTVPGETRSPFVTSGIRIGSPALTARGMKEKEFELIANKICDVLDDINNTSLQAKISKELEELSSNFVIYNQASY

SEQ ID NO: 10185 - DNA, 1263 bp, Arcobacter butzleri RM4018
  CDS (1)..(1263): transl_table=11
atgagatatataacagaagcgaagttaaaagaggcagatgtagaagtatataatatcatagaagaggagttgaaaagacaaacaactcacttagagatgatagcaagtgagaatttcacatctccagcagtaatggaagcaatgggaagtgtatttacaaataaatatgcagaaggttatccatataaaagatattatggaggatgtgaacaagcagataaagtagaacaattagcaattgatagagcttgtgaaatatttggatgtaaatatgcaaatgttcaaccacactcaggaagccaagcaaatggagcagtatatgcagcattaataaaagctggtgataaaatcttaggtatggatttatctcatggtggacatttaactcatggttctaaaccatcattctctggacaaaattatcaagcattctattatggagttgaacttgatggaagaattaattatgataaagttgaagaaatagcaaaaatagttcaaccaaaaataatcgtttgtggtgcttctgcatacgcaagagaaattgattttaaaagatttagagaaatagctgatttagttggagctattttatttgcagatattgcacatattgcaggtcttgtagcagctaatgaacatccaagtccatttcctcattcacatatagttacaactactactcataagactttaagaggtccaagaggtggtatgataatgacaaatgatgaagatattgctaaaaaaataaactcagctattttcccaggacttcaaggtggaccattagttcatgtaatagcagcaaaagcagtagcatttaaagagatacttgatccaaaatggaaagattatgcaaaacaagtaaaagcaaatgcaaaagtgttaggagaagttctaacaaaaagaggatatgatatagtaagtggtggaacagataatcacttagtattagtaagttttttaaataaaccattttcagggaaagatgcagatgcagctttaggaaacgcagggataactgtaaataagaatacagtaccaggagaaacaagaagtccatttataacatcagggattagaataggatctccagcattaacagcaagagggatgaaagaaaaagagtttgaattaatagcaaacaaaatatgtgatgtattagatgacataaataacactagtttacaagctaaaattagcaaagagttagaggaattatctagcaattttgttatttacaacaacggtacatactaa

SEQ ID NO: 10186 - protein, 420 aa, Arcobacter butzleri RM4018
MRYITEAKLKEADVEVYNIIEEELKRQTTHLEMIASENFTSPAVMEAMGSVFTNKYAEGYPYKRYYGGCEQADKVEQLAIDRACEIFGCKYANVQPHSGSQANGAVYAALIKAGDKILGMDLSHGGHLTHGSKPSFSGQNYQAFYYGVELDGRINYDKVEEIAKIVQPKIIVCGASAYAREIDFKRFREIADLVGAILFADIAHIAGLVAANEHPSPFPHSHIVTTTTHKTLRGPRGGMIMTNDEDIAKKINSAIFPGLQGGPLVHVIAAKAVAFKEILDPKWKDYAKQVKANAKVLGEVLTKRGYDIVSGGTDNHLVLVSFLNKPFSGKDADAALGNAGITVNKNTVPGETRSPFITSGIRIGSPALTARGMKEKEFELIANKICDVLDDINNTSLQAKISKELEELSSNFVIYNNGTY

SEQ ID NO: 10187 - DNA, 1263 bp, Rickettsia canadensis str. McKiel
  CDS (1)..(1263): transl_table=11
atgaatatttttaataataatttacatgaaacggataaagacattgatgaaataataaagcatgaaaagatacgtcaaagtagcgtaatcgagcttattgcatcagagaatttcataagtcctgcggttcttgaagctcaagggtcaattctaactaataaatatgcagaagggtatccgagtaagcgtttctataacggttgtgaggaagtcgataaagctgaaaacttagctatagagcgagcaaagaaattatttaattgcaaatatgcaaatgtgcaacctcattcaggctcacaagcaaaccaagctgtgtatcttgctttgttacagcctggagatacaattcttggtatgtccttagatagtggcggacatctaacgcacggtgcagcccctaatatatccggtaaatggtttaatgccgtttcttatagcttaaataaagagacttatttaattgattataatgaaattgagaggttagctgatttacataagccaaaattacttatagcaggtttttctgcttatcctcgtaatattgattttgcaaaatttagagaaattgcggataaagttggagcgtatttcatggcagatattgctcatattgcaggactcgttgccacaggtgagcatcaaagcccgcttgcctttgcacatattgttacctctactactcataaaacattgcgaggtccaagaggcggtttaattttatctaatgatgaagagattggaaaaaagataaattctgcattatttccgggattgcagggtggaccgttaatgcatgtcattgctgcaaaagccgtagctttccaagaagcattacagcctaaatataaaagttatattcagcaagttataagtaacgctgaagctttagcaaggatcttacaagaaagaggatatgatatattaacaggtggtaccgacaatcatattgttttagtggatttgcgtaaagacggaatcacaggtaaacttgctgctaattctttagatagagcaggtattacatgcaataaaaatactattccgtttgataaaacttcgccttttattacttcaggcattaggctcggtactcccgcatgcactactagagggtttaaagaaaaggattttgtattagttgctcatatgatagcagatattttagatggatgcaaaaataatgaagataatagtaaggctgagcagaaagtattaactgaagtgacacaattaattaaattatttcctttctatggctaa

SEQ ID NO: 10188 - protein, 420 aa, Rickettsia canadensis str. McKiel
MNIFNNNLHETDKDIDEIIKHEKIRQSSVIELIASENFISPAVLEAQGSILTNKYAEGYPSKRFYNGCEEVDKAENLAIERAKKLFNCKYANVQPHSGSQANQAVYLALLQPGDTILGMSLDSGGHLTHGAAPNISGKWFNAVSYSLNKETYLIDYNEIERLADLHKPKLLIAGFSAYPRNIDFAKFREIADKVGAYFMADIAHIAGLVATGEHQSPLAFAHIVTSTTHKTLRGPRGGLILSNDEEIGKKINSALFPGLQGGPLMHVIAAKAVAFQEALQPKYKSYIQQVISNAEALARILQERGYDILTGGTDNHIVLVDLRKDGITGKLAANSLDRAGITCNKNTIPFDKTSPFITSGIRLGTPACTTRGFKEKDFVLVAHMIADILDGCKNNEDNSKAEQKVLTEVTQLIKLFPFYG

SEQ ID NO: 10189 - DNA, 1263 bp, Rickettsia massiliae MTU5
  CDS (1)..(1263): transl_table=11
atgaatatttttaataaaaatttacatgaaacggataaagagattaatgaaataataaagcatgaaaagctacgtcaaagtagcgtaatcgagcttattgcatcagaaaatttcgtaagtcctgctgtgcttgaagctcaagggtcgcttctgactaacaaatatgccgaaggatacccaagtaagcgattctataacggttgcgaggaagtagataaagctgaaaatttagctatagaacgagtaaaaaaactctttaactgcaaatatgcaaatgtccaacctcattcaggatcacaagcaaatcaggctgtatatcttgctttattacagccgggtgatacggttcttggtatgtctttagatagcggcgggcatctaacgcacggtgcagctcctaatatgtccggtaaatggtttaacgtcgtttcttatagtgtaaataaagagacttatttaatcgattatgatgagattgaacgcttagcggatttacataaaccaaaattacttatagccggtttttctgcttatcctcgtaatattgattttgcaaaatttagagaaatcgtggataaagtaggagcttactttatggcagatattgctcatattgcaggacttgttgccacaggtgagcatcaaagccctattccttacgctcacgctgttacctctactactcataaaacacttagaggtccaagaggcggtttaattttatctaacgatgaagagataggtcaaaaaataaattctgcattatttccaggactacaaggtggtccgttaatgcatataatcgccgcaaaagccgtagcttttttagaaaatttgcagcctgaatataaaagttatattcagcaggtaataagtaacgctaaagctttagcaagtagcttgcaagaaagaggatatgatatattaacaggtggtaccgataatcatattgttttagtggatttgcgtaaagacggaatcacgggtaagtttgccgcaaattctttggatagagcagggattacgtgtaataagaatgctatcccgtttgatgaaacttcgccttttatcacttcaggtattcgccttggtactcccgcatgtactactagaggctttaaagaaaaggattttgtattagttggttatatggtagcagatattttagacggcttaaaaaataatgaagataatagcgatcttgagcagaaagtattaaatgaagtgacaaaattaattaaattatttccgttttatggctaa

SEQ ID NO: 10190 - protein, 420 aa, Rickettsia massiliae MTU5
MNIFNKNLHETDKEINEIIKHEKLRQSSVIELIASENFVSPAVLEAQGSLLTNKYAEGYPSKRFYNGCEEVDKAENLAIERVKKLFNCKYANVQPHSGSQANQAVYLALLQPGDTVLGMSLDSGGHLTHGAAPNMSGKWFNVVSYSVNKETYLIDYDEIERLADLHKPKLLIAGFSAYPRNIDFAKFREIVDKVGAYFMADIAHIAGLVATGEHQSPIPYAHAVTSTTHKTLRGPRGGLILSNDEEIGQKINSALFPGLQGGPLMHIIAAKAVAFLENLQPEYKSYIQQVISNAKALASSLQERGYDILTGGTDNHIVLVDLRKDGITGKFAANSLDRAGITCNKNAIPFDETSPFITSGIRLGTPACTTRGFKEKDFVLVGYMVADILDGLKNNEDNSDLEQKVLNEVTKLIKLFPFYG

SEQ ID NO: 10191 - DNA, 1233 bp, Alkaliphilus oremlandii OhILAs
  CDS (1)..(1233): transl_table=11
atgaactttgatacgctaaagattgctgatccggaaatttatgaggtaatacaaaaagaaacaaaaagacagcgagggaatatagaactgatagcatctgaaaactttgttacagaagcagtaatggaagccatgggaagtcaattaactaataagtacgctgaaggatatccaggaaaaagatattacggaggctgtgaagaagtagatgttgcggaagatttagcgagagatcgattaaaaaagttatttaatgcagaacatgccaatgtacagcctcattcaggagccaatgcaaatattggggtatactttgcgatattaaagccaggagatactgttttaggtatgaacttatcccatggtggacatttaactcacggtagtccagtaaatatttctggtacatattataattttgtcgattatggtgttgataaggaaacccatctcatcaattacgaggaagtaagaagaattgcaaatgagattaagccaaagctcatcgtagcaggtgcaagtgctttcccaagaaaaattgattttaaaaagtttagagaaatcgcagatgaagttggtgcatatttaatggtggacatggctcatattgcaggtcttgttgctgctggattacatgaaaatccttgtgattatgcggatttcgttacgacaactacacataaaacattgagaggacctagaggcggagcgatcttatgcaaagagaaatatgcgaaaatgattgacaaagcaattttccctggtcttcaaggtggaccgctgatgcatgtgattgctgcaaaggctgtttcctttaaagaagctttatccccagaatttaaagcttaccaagaacaagtaattaaaaatgcggctaagctgggggaggaattaaaaagcagaggttttaacttagtttctggtggaacagacaaccacttgctattattagacctaagaaataaaaatattacagggaaagatgctgaaaaactattagacgaagtcggtgttactgtaaataaaaatacaataccgtatgaccctgaaagtccattcgtgaccagtggcattcgcattggtacgcctgcagttacaacaagaggtatgaaggaagatgatatggtaacaattgcagaaatcatcggtacaatcatcgaccatccagagagaatagacgaagtctcttccatggttaaaaatctttgtgaaaagtttaagctatatgaataa

SEQ ID NO: 10192 - protein, 410 aa, Alkaliphilus oremlandii OhILAs
MNFDTLKIADPEIYEVIQKETKRQRGNIELIASENFVTEAVMEAMGSQLTNKYAEGYPGKRYYGGCEEVDVAEDLARDRLKKLFNAEHANVQPHSGANANIGVYFAILKPGDTVLGMNLSHGGHLTHGSPVNISGTYYNFVDYGVDKETHLINYEEVRRIANEIKPKLIVAGASAFPRKIDFKKFREIADEVGAYLMVDMAHIAGLVAAGLHENPCDYADFVTTTTHKTLRGPRGGAILCKEKYAKMIDKAIFPGLQGGPLMHVIAAKAVSFKEALSPEFKAYQEQVIKNAAKLGEELKSRGFNLVSGGTDNHLLLLDLRNKNITGKDAEKLLDEVGVTVNKNTIPYDPESPFVTSGIRIGTPAVTTRGMKEDDMVTIAEIIGTIIDHPERIDEVSSMVKNLCEKFKLYE

SEQ ID NO: 10193 - DNA, 1251 bp, Prochlorococcus marinus str. MIT 9211
  CDS (1)..(1251): transl_table=11
ttgactcatattaattccgctctagaggatgctgatccaaatattgcctctctaatacaagaagaaagtaaacggcaagagaatcacttggagcttattgcaagcgagaactttacctccaaagcagtaatggaagctcaggggtctgttttaaccaataaatatgcagaaggtcttccaaataagcgctactacggaggctgtgaacacattgataagattgaaggtttagcaattgaaagagccaagcaattatttaaagccgaatgggcaaatgttcaacctcatagtggagcccaggctaatttctcggtattcctatctctcttggaacctggcgaaaaaattatgggaatggacctttcccatggtggccatttaactcatggttctccagtgaacgttagtggcaaatggtttaaagctattcattacggagtagataaagagacacaaagacttgaaatggagaatgtccgtgaaattgctctaaaaaatcgaccaaaattaataatttgtggatactctgcttatccaagaaatattgattttttagcttttagatcaattgcagatgaagttggagcatatttgttagcagatatggcccatatcgcagggctggttgcaactggaatccatccaagtccaataccccattgcgatgtggttaccacaacgacccataaaacacttcgagggcctagaggcgggttaatactctgcagaaatgcagaatttggcaaaagatttgacaaggccgtatttcctggcagtcaaggaggtccactggagcatgttattgcggcaaaagcagtggcttttggagaagccttgaagccagggtttagttcctattgcgaacaacttgtgaaaaattcaaaagctcttgcaaaacgaatgcaagatagaggcatagcagttgtaagcaatggaactgataaccacattgttcttctagatctaagaagtattgatatgactgggaaagaagctgattcacttgttagtgcaataaatgtcactaccaataagaatacggtcccttttgatccaaaatccccattcgtaactagtgggctcagattaggtactgcagcattaaccactcgaggttttgatgagccagcattcttagaagtcgcagatttgatcgctgatcgcctgttaaacccaacggacttaatattaaaaaacaaatgtcagcaaagggttcttgatttatgcaatcgattcccgctatatgactga

SEQ ID NO: 10194 - protein, 416 aa, Prochlorococcus marinus str. MIT 9211
MTHINSALEDADPNIASLIQEESKRQENHLELIASENFTSKAVMEAQGSVLTNKYAEGLPNKRYYGGCEHIDKIEGLAIERAKQLFKAEWANVQPHSGAQANFSVFLSLLEPGEKIMGMDLSHGGHLTHGSPVNVSGKWFKAIHYGVDKETQRLEMENVREIALKNRPKLIICGYSAYPRNIDFLAFRSIADEVGAYLLADMAHIAGLVATGIHPSPIPHCDVVTTTTHKTLRGPRGGLILCRNAEFGKRFDKAVFPGSQGGPLEHVIAAKAVAFGEALKPGFSSYCEQLVKNSKALAKRMQDRGIAVVSNGTDNHIVLLDLRSIDMTGKEADSLVSAINVTTNKNTVPFDPKSPFVTSGLRLGTAALTTRGFDEPAFLEVADLIADRLLNPTDLILKNKCQQRVLDLCNRFPLYD

SEQ ID NO: 10195 - DNA, 1254 bp, Shewanella baltica OS195
  CDS (1)..(1254): transl_table=11
atgctgaaaaaagatatgaatatcgcagattatgatccggaactgtttaaggcaattcagaatgaaactctgcgtcaagaagagcatattgagctgattgcttctgaaaactacaccagtccacgcgtgatggaagcgcaaggttcacagttaaccaataagtacgctgaaggctatccaggcaagcgttactacggtggttgtgagtatgtggacgtagttgaaaccttagcgattgaacgtgcgaaagaactgtttggcgcaacttacgctaacgtacaacctcattcaggttcacaggcaaacagcgctgtttacatggcattgttaaaacctggcgataccgtactgggcatgaacttagcccacggtggtcacttgacccacggttcacccgttaacttctctggcaaactgtacaatatcattccttatggtatcgacgagtctggcaaaattgactacgacgaaatggaacgtctggccgtagaacataaacctaagatgatgatcggcggtttctctgcctattctggtatagttgactgggcaaaaatgcgtgaaatcgcagacaaaataggtgcttacctatttgtcgatatggcgcacgttgccggtcttatcgctgcgggtgtttatccaaacccagtaccacacgcacacgttgtgacgtcaacgactcacaaaactttagccggtcctcgtggtggtgtgatcctgtctgctgctgacgatgaagacttgtacaaaaagttgaattctgcagtattcccaggcggtcaaggtggcccattaatgcacgttatcgccggtaaagcggttgcgttcaaagaagccctagagccagaatttaaagtgtaccaacagcaagtggttaacaacgctaaagctatggttgaagtgttccttgagcgcggttataaaatcgtctctggcggaaccagcaaccacttaatgttagttgatctgattggtcgtgacttgaccggtaaagaagccgatgccgccttaggtagcgctaacattaccgtgaacaaaaactcagtaccaaacgatccacgttcaccttttgtgacctcaggtgtgcgtatcggtacgccagccattacgcgccgcggctttaaagaagcggaatcgaaagagctgactggctggatttgtgacatccttgatgatgcaagcaatcctgctgtgattgagcgtgttaagggccaagtattggcactgtgtgcacgtttccctgtttacggctaa

SEQ ID NO: 10196 - protein, 417 aa, Shewanella baltica OS195
MLKKDMNIADYDPELFKAIQNETLRQEEHIELIASENYTSPRVMEAQGSQLTNKYAEGYPGKRYYGGCEYVDVVETLAIERAKELFGATYANVQPHSGSQANSAVYMALLKPGDTVLGMNLAHGGHLTHGSPVNFSGKLYNIIPYGIDESGKIDYDEMERLAVEHKPKMMIGGFSAYSGIVDWAKMREIADKIGAYLFVDMAHVAGLIAAGVYPNPVPHAHVVTSTTHKTLAGPRGGVILSAADDEDLYKKLNSAVFPGGQGGPLMHVIAGKAVAFKEALEPEFKVYQQQVVNNAKAMVEVFLERGYKIVSGGTSNHLMLVDLIGRDLTGKEADAALGSANITVNKNSVPNDPRSPFVTSGVRIGTPAITRRGFKEAESKELTGWICDILDDASNPAVIERVKGQVLALCARFPVYG

SEQ ID NO: 10197 - DNA, 1239 bp, Clostridium phytofermentans ISDg
  CDS (1)..(1239): transl_table=11
atgtattcatttgaagatataaaagtatttgatccagaattagcggatagtatcacaatggaaatcgcaagacagaacgatcatattgaattgatagcatcagagaattttgttagtaaggcagttatggctgcaatgggtagcccactaacaaataaatacgcagaaggatatccaggaaaaagatattatggcggatgcgaatttgttgatatagctgagaatttagcgatcgagagagcaaagaagttatttggttgtacttacgccaatgttcagcctcactctggtgcacaggcgaatatggcagtattcttcgctttattacagccaggagatacagttatgggtatgaatcttgcacatggtgggcacttaactcacggtagcccagtaaacttctccggttcttactttaatattgtaccatatggtgtggatgacaatggttttatcgactatgaagaggtagagaaaatagcaaaggaatgtaagccaaaattaatcgtagctggagcttctgcttatgctagaaagattgactttaaacgtttccgtgaaattgctgacttagtaggtgcatacttgatggttgatatggcacatattgctggattagtagctgctggttatcatcaatcaccaataccatatgcgcacgttacaactacaacgactcataagacattacgtggtcctagaggcggtatgattttatctagtgaagagtttgccgaagagcataagcttaataagtccatattcccaggaactcaagggggaccgttaatgcatgtaattgctgcaaaagctatctgttttaaagaagcactagatgatagcttcaaagattatgctgggaaaatcatctccaatgcgggggcattagcaaatgagttaacagcacgtggatttaacttggtatctggaggtaccgacaaccacttaatgttaattgacttacagaatatgaacattacaggaaaagaggcagaacatattttagatgaagctaacattacttgtaataagaatactgttccaaatgatccagcttctccatttgtaacaagcggaatccgtcttggtacacctgctattactacaagaggctttaatgaaaaagatatggctgttgttgcagaagcaatttcacttgtagttaaagatgtagataaaaacaaggaacaggcaaaagctttggttaagatgttaacggatgcgtatccgctatattaa

SEQ ID NO: 10198 - protein, 412 aa, Clostridium phytofermentans ISDg
MYSFEDIKVFDPELADSITMEIARQNDHIELIASENFVSKAVMAAMGSPLTNKYAEGYPGKRYYGGCEFVDIAENLAIERAKKLFGCTYANVQPHSGAQANMAVFFALLQPGDTVMGMNLAHGGHLTHGSPVNFSGSYFNIVPYGVDDNGFIDYEEVEKIAKECKPKLIVAGASAYARKIDFKRFREIADLVGAYLMVDMAHIAGLVAAGYHQSPIPYAHVTTTTTHKTLRGPRGGMILSSEEFAEEHKLNKSIFPGTQGGPLMHVIAAKAICFKEALDDSFKDYAGKIISNAGALANELTARGFNLVSGGTDNHLMLIDLQNMNITGKEAEHILDEANITCNKNTVPNDPASPFVTSGIRLGTPAITTRGFNEKDMAVVAEAISLVVKDVDKNKEQAKALVKMLTDAYPLY

SEQ ID NO: 10199 - DNA, 1248 bp, Delftia acidovorans SPH-1
  CDS (1)..(1248): transl_table=11
atgtttcaacgcaccaataccgtcgagaaggtcgacgccgaagtctttgccgccatccaggccgagaacctgcgtcaacaagaacatatcgagctgatcgccagcgagaactattgctcgcctgccgtcatggaagcccagggctcccagctcaccaacaagtacgccgaaggctatccgggcaagcgctactacggcggctgcgagaacgtcgatgtggtcgagcagctcgccatcgaccgcgtcaagaagctgttcggcgccgaagccgccaacgttcagcccaactccggctcccaggccaaccaggccgtgctgatggcctttgccaagcccggcgacaccatcatgggcatgagcctggccgaaggcggtcacctgacgcacggcatgccgctgaacatgtcgggcaagtggttcaacgtggtctcctacggcctgaacgccgaagaagccatcgactacgacaagatggaagcgctggcgcgcgaacacaagccccgcatcatcgtggccggcgcatcggcctacgccctggccatcgacttcgaacgcttcgccaagatcgcaaaggaagtcggcgccatcttctgggtggacatggcccactatgccggcctgatcgccgcaggcgtgtaccccaaccccgtgccccatgccgacgtggtcaccaccaccacgcacaagagcctgcgcggcccgcgcggcggcgtgatcctgatgaaggccgagcacgagaaggccatcaacagcgccatcttccccggcctgcaaggcggcccgctgatgcatgtcattgccggcaaggccgtggccttcaaggaagcgctgtcgcccgagttcaagacctaccaggaacaggtcgtgaagaacgccaaggttgtcgcggaaacgctgacggcacgcggtctgcgcatcgtctccggccgcacggaaagccacgtcatgctggtggacctgcgcgccaagggcatcaccggcaaggcggccgaagccgcgctgggtgccgcccacatgacgatcaacaagaactccatccccaacgatcccgaaaagccgatggtgaccagcggcatccgcgtgggcacgcccgccatgaccacgcgcggcttcaaggaagaggaagcccgcctgacagccaacctgctggccgacgtgctggagaaccccgccgacgaagccaacctggcccgcgtgcgcgcccaggtggccgagctgacggcccgcttcccggtctacggcgcctga

SEQ ID NO: 10200 - protein, 415 aa, Delftia acidovorans SPH-1
MFQRTNTVEKVDAEVFAAIQAENLRQQEHIELIASENYCSPAVMEAQGSQLTNKYAEGYPGKRYYGGCENVDVVEQLAIDRVKKLFGAEAANVQPNSGSQANQAVLMAFAKPGDTIMGMSLAEGGHLTHGMPLNMSGKWFNVVSYGLNAEEAIDYDKMEALAREHKPRIIVAGASAYALAIDFERFAKIAKEVGAIFWVDMAHYAGLIAAGVYPNPVPHADVVTTTTHKSLRGPRGGVILMKAEHEKAINSAIFPGLQGGPLMHVIAGKAVAFKEALSPEFKTYQEQVVKNAKVVAETLTARGLRIVSGRTESHVMLVDLRAKGITGKAAEAALGAAHMTINKNSIPNDPEKPMVTSGIRVGTPAMTTRGFKEEEARLTANLLADVLENPADEANLARVRAQVAELTARFPVYGA

SEQ ID NO: 10201 - DNA, 1272 bp, Petrotoga mobilis SJ95
  CDS (1)..(1272): transl_table=11
atgtgggaagatttaaagagttctgataacgaagtttacgagattcttcaaaaagagcttaaaaggcaagagtatggtttagaattgattgcatcagagaattatgcgtcaaaatctgttatggaagccgcaggaagtatttttacgaataaatatgccgaaggttacccaaaaagaagatattatggaggatgtgaatatatagacgaggttgagacgcttgctcgggatagagcaaaagaacttttcaatgcaaagtttgcgaacgttcaaccccattcagggtcccaagcgaatatgggcgcttatctagcgcttatgaaacctggggatacattaatgggaatgtcgttgagccatggtggccatctaacccatggcgctccagtaaatttctcaggtatgttgttcaatgttgtttcttatggtgtcgatgaagaaacggaaacaatcaattatgatgaggttgaaagaatagcgaaggatgcaaaacctaaagttattgtggcaggtgggagtgcatactctaggataatagattttaaaagatttagagagatagccgatgaagttggtgcgtatttaatggttgatatggcccattttgcaggattagttgccgctggtattcatccaaacccagttgagtacgcgcatgtcgttacttcgacaacgcataaaactttaagagggccaagaggtgggattattctcacaaacgatagtgatatttacaaatcaatcaataaaattatttttccagggatacaaggcggtcccttagaacatataatagcggcaaaggctgttgcttttaaagaagctatgagtggagagttcaaagaatatcagaaacaagttgttagaaattctaaagctttaagcaatgaacttgctagtaaaaatttgagaatcgtctcaggtggaacggatacgcatttgttcttggtggatctatctgagcttaatataacagggaaagccttggaaaaggctttagggcaatgcgatattacagttaataagaatactgttcccaaagaaacgttgtcgccttttgtgactagtggaataaggattggtacccctgcggttaccacacgtggtatgaaagaagaagaaatgaaagaaatcgcttcaatgatagcaaaagttgcaaacaatgttcttgatgaagaagggaatatagataaagatttagcacaagaaattaaaaaagatgttgtttctctctgtcaacgttttccaatgtatgcagatttgattgagtga

SEQ ID NO: 10202 - protein, 423 aa, Petrotoga mobilis SJ95
MWEDLKSSDNEVYEILQKELKRQEYGLELIASENYASKSVMEAAGSIFTNKYAEGYPKRRYYGGCEYIDEVETLARDRAKELFNAKFANVQPHSGSQANMGAYLALMKPGDTLMGMSLSHGGHLTHGAPVNFSGMLFNVVSYGVDEETETINYDEVERIAKDAKPKVIVAGGSAYSRIIDFKRFREIADEVGAYLMVDMAHFAGLVAAGIHPNPVEYAHVVTSTTHKTLRGPRGGIILTNDSDIYKSINKIIFPGIQGGPLEHIIAAKAVAFKEAMSGEFKEYQKQVVRNSKALSNELASKNLRIVSGGTDTHLFLVDLSELNITGKALEKALGQCDITVNKNTVPKETLSPFVTSGIRIGTPAVTTRGMKEEEMKEIASMIAKVANNVLDEEGNIDKDLAQEIKKDVVSLCQRFPMYADLIE

SEQ ID NO: 10203 - DNA, 1260 bp, Salmonella enterica subsp. arizonae serovar 62:z4,z23:--
  CDS (1)..(1260): transl_table=11
atgcggatgttaaagcgtgaaatgaacattgccgattatgatgccgaattgtggcaggctatggagcaggaaaaagtacgtcaggaagagcacatcgaactgatcgcctccgaaaactacaccagcccgcgcgttatgcaggcgcaggggtctcagctaaccaacaaatatgctgaaggatatccgggcaaacgctactacggcggttgcgaatacgttgatatcgttgagcaactggctatcgaccgcgcaaaagaactgttcggcgctgactatgctaacgtacaacctcattccggctctcaggctaacttcgcggtttacaccgcgctgctgcagccaggcgataccgttctgggtatgaacctggcgcagggcggccacctgactcacggttctccggttaacttctccggcaaactgtacaacattattccttacggtattgatgcgtccggtaaaattgactacgacgatatggcgaagcaggctcaggaacacaaaccgaagatgattatcggtggcttctctgcttactccggtgtggttgactgggcaagaatgcgtgaaatcgccgacagtatcggcgcgtatctgtttgtggatatggcgcacgttgcgggcctgattgccgcaggcgtttatccgaacccggttccccatgcgcatgtggtcacgaccaccacgcacaaaactctggcaggtccgcgtggcggcctgatcctggcaaaaggcggcgacgaagatctgtacaaaaaactgaactctgccgtcttcccaagcgcgcagggcggcccgctgatgcacgttatcgcggcgaaagccgtagcgctgaaagaagcgatggagccagagttcaaagtttaccagcagcaggtagcgaaaaacgccaaagcaatggtcgaagtgttcctgaatcgaggttataaagtggtttccggcggcactgaaaaccacctgttcctgctggatctggtagataagaacctgactggtaaagaagccgacgccgctctgggccgcgccaatatcactgtaaacaaaaacagcgtgccgaacgatccgaagagcccgttcgtcacctctggtatccgtatcggttctccggcagtaacccgtcgcggctttaaagaagcagaagtgaaagaactggctggctggatgtgcgacgttctggacaacatcaatgatgaagccaccatcgaacgcgtgaaaacgaaagtactggatatctgcgctcgcttcccggtttacgcgtaa

SEQ ID NO: 10204 - protein, 419 aa, Salmonella enterica subsp. arizonae serovar 62:z4,z23:--
MRMLKREMNIADYDAELWQAMEQEKVRQEEHIELIASENYTSPRVMQAQGSQLTNKYAEGYPGKRYYGGCEYVDIVEQLAIDRAKELFGADYANVQPHSGSQANFAVYTALLQPGDTVLGMNLAQGGHLTHGSPVNFSGKLYNIIPYGIDASGKIDYDDMAKQAQEHKPKMIIGGFSAYSGVVDWARMREIADSIGAYLFVDMAHVAGLIAAGVYPNPVPHAHVVTTTTHKTLAGPRGGLILAKGGDEDLYKKLNSAVFPSAQGGPLMHVIAAKAVALKEAMEPEFKVYQQQVAKNAKAMVEVFLNRGYKVVSGGTENHLFLLDLVDKNLTGKEADAALGRANITVNKNSVPNDPKSPFVTSGIRIGSPAVTRRGFKEAEVKELAGWMCDVLDNINDEATIERVKTKVLDICARFPVYA

SEQ ID NO: 10205 - DNA, 1248 bp, Burkholderia multivorans ATCC 17616
  CDS (1)..(1248): transl_table=11
atgtttgacagagcccaaagcaccatcgcgaacgtcgatcccgaagtctttgcagcgatcgagcaggaaaaccgtcgccaggaagagcacatcgagctgatcgcgtcggaaaactacacgagcccggccgtgatggccgcgcagggctcgcagctcacgaacaagtacgcggaaggctatccgggcaagcgctactacggcgggtgcgagtatgtcgacgtcgtcgagcagctcgcgatcgaccgcgtcaagcaactgttcggcgccgaagcggccaacgtgcagccgaactcgggctcgcaggcgaaccagggcgtgttcttcgcgatgctcaagccgggcgacacgatcatgggcatgagcctcgcgcacggcggccacctcacgcacggctcgccggtcaacatgtcgggcaagtggttcaacgtggtcagctacgggctgaacgagaacgaagacatcgactacgaagcggccgagaagctcgcgcaggaacacaagccgaagctgatcgtcgcgggcgcgtcggcgttcgcgctgaagatcgacttcgagcgtctggcgaagatcgcgaagtcggtcggcgcatacctgatggtcgacatggcgcactacgcggggctgatcgccgcgggcgtctatccgaacccggtgccgcacgccgacttcgtcacgacgaccacgcacaagagcctgcgcggcccgcgcggcggcgtgatcctgatgaaggccgagtacgagaagcagatcaactcggcgatcttcccgggcatccagggcggtccgctgatgcacgtgatcgcagcgaaggccgtagcgttcaaggaagcgctgtcgccggagttcaaggcctatcagcagaaggtggtcgagaacgcccgtgtgctggccgagacgctcgtcaagcgcggcctgcggatcgtgtcgggccgcaccgaaagccacgtgatgctggtcgacctgcgtgcgaagaacatcaccggcaaggcggcggaagccgcgctgggcgccgcgcacatcaccgtgaacaagaacgcgattccgaacgatccggaaaagccgttcgtgacgagcggcattcgtctgggctcgccggcgatgaccacgcgcggcttcggcccggccgaagcggagcaggtcggcaacctgatcgccgacgtgctcgagaacccggaagacgcagcgacgatcgagcgcgtgcgcgcacaggtcgccgagctgaccaagcgcttcccggtctaccgctga

SEQ ID NO: 10206 - protein, 415 aa, Burkholderia multivorans ATCC 17616
MFDRAQSTIANVDPEVFAAIEQENRRQEEHIELIASENYTSPAVMAAQGSQLTNKYAEGYPGKRYYGGCEYVDVVEQLAIDRVKQLFGAEAANVQPNSGSQANQGVFFAMLKPGDTIMGMSLAHGGHLTHGSPVNMSGKWFNVVSYGLNENEDIDYEAAEKLAQEHKPKLIVAGASAFALKIDFERLAKIAKSVGAYLMVDMAHYAGLIAAGVYPNPVPHADFVTTTTHKSLRGPRGGVILMKAEYEKQINSAIFPGIQGGPLMHVIAAKAVAFKEALSPEFKAYQQKVVENARVLAETLVKRGLRIVSGRTESHVMLVDLRAKNITGKAAEAALGAAHITVNKNAIPNDPEKPFVTSGIRLGSPAMTTRGFGPAEAEQVGNLIADVLENPEDAATIERVRAQVAELTKRFPVYR

SEQ ID NO: 10207 - DNA, 1260 bp, Coxiella burnetii RSA 331
  CDS (1)..(1260): transl_table=11
atgtatgagcctacgttgaccgtagagagtttcgattccgaattggcgggagcgattcgggacgaaaggcgtcggcaggagcaccatgttgagttgattgcctcggagaactatgtcagtccgcgggtgttggaacttcaggggtcggtgttgaccaataagtacgctgaagggtatcctggcaggcgttattacggtggttgtgaatttgtcgatattgccgagcaattggcgattgatcgagcgaaggaactgtttgtggcggattatgcgaacgttcagccgcattcgggttcgcaagccaatgcagaagcctatatggcgctaatgaatccaggcgataccttgcttgccatggatttgtcgcatggagggcacttgacccacggctctcctgtcagtttttcaggtaagttctataaagccgtgcattacggtttaaatgcgcatggtgatattgattacgagcaagcggcccaactagcgcaagagcataaaccgaaagtcatcctagcgggattttctgctttttcgggtatcgtcgattggcagcgttttcgcgaaatcgcggacagtgttaacgcctactttatgactgacattgcacatgtggctggtttagtggccgccggcgtctatccttcgccggttcaaattgctgatgttacgacgaccacgacccataaaacattacgaggccctcgtgcgggtttaattttagcaaaagccaaccccgaactagaaaagcgtttaaattccgccgtatttccaggttctcagggcggacctttgatgcacattattgcggccaaagcagttgccttcaaagaagcgatgcaaccggaatttaaaacttatgcgcaacagattttaaaaaatgctaaggcaatggcggaggtgatgaaggagcgcggttatacgattgtctcgggtggcacgcaaaatcacctatttttagtgagcttgttagataaaaacatatcgggcaaagaagccgaagcggctttaggacgagctaatattacagttaacaaaaataccgttcccggtgaaacccgctcgccttttgtgactagtggccttcgcattggcactcccgccattaccacccgagggtttaaagaaaaagaagcttctcaattggcgcattgggtttgtgatattttagatgatattcataacgaaaaagtcatcgccgatgtcaaacaaaaagcccatgaattgtgtgggaaatttccggtgtatcaggaactcgactga

SEQ ID NO: 10208 - protein, 419 aa, Coxiella burnetii RSA 331
MYEPTLTVESFDSELAGAIRDERRRQEHHVELIASENYVSPRVLELQGSVLTNKYAEGYPGRRYYGGCEFVDIAEQLAIDRAKELFVADYANVQPHSGSQANAEAYMALMNPGDTLLAMDLSHGGHLTHGSPVSFSGKFYKAVHYGLNAHGDIDYEQAAQLAQEHKPKVILAGFSAFSGIVDWQRFREIADSVNAYFMTDIAHVAGLVAAGVYPSPVQIADVTTTTTHKTLRGPRAGLILAKANPELEKRLNSAVFPGSQGGPLMHIIAAKAVAFKEAMQPEFKTYAQQILKNAKAMAEVMKERGYTIVSGGTQNHLFLVSLLDKNISGKEAEAALGRANITVNKNTVPGETRSPFVTSGLRIGTPAITTRGFKEKEASQLAHWVCDILDDIHNEKVIADVKQKAHELCGKFPVYQELD

SEQ ID NO: 10209 - DNA, 1323 bp, Gluconacetobacter diazotrophicus PAl 5
  CDS (1)..(1323): transl_table=11
ttgaaggaactggagaatataacgatgccggaccagatgagccagagcgggttgcacgcctatttccgctccccgcttgccgaacgcgatcccctggtcgcggagatcatcgcgggtgaactggaacgccagcgcgacggaatcgaactgatcgccagcgagaacatggtgtccgaggcggtgctgcaggcgcagggcagcgtgctgacgaacaaatacgccgagggttatcccggccgccgctattacggcggctgcgccgaggtggacaaggtcgagagcctggccatcgagcgggtgaagacgctgttcggcgcgggcttcgcgaacgtgcagccccattccggcgccaacgcgaaccaggcggcgttcatggcgctggtcagcccgggcgataccattctgggcatgagcctggcggcgggcggccacctgacgcacggggcggcgccgaactattccggcaaatggttccgcgcggtgcagtacggcgtgcggcgcgaggacgggctgctggattacgaggagatggagcgcctggcccgggccgagaagccgaagctgatcgtggcggggggctcggcctatccgcgcgcgatcgatttcgcccgcttccgcgccatcgcggacgaagtcggggcctacctgatggtcgacatggcccattatgccggactggttgcggcgggcctgtatccctcgccgatggcgcatgcgcatgtggtgaccagcacgacgcacaagaccctgcgcggcccgcgcggcggcctgatcctgacgaatgacgcggacctggcgaagaagatcaactcggcggtcttccccgggctgcagggcggcccgctgatgcacgtgatcgcggccaaggccgtggcgttcggcgaggcgctgcagccggaattccgcgcctatcaggaagcggtggcggcgaatgcccgcgtgctggcggaaacgctgctgtcgcgcgggttcgacatcgtgacggggggcacggacagccacctgctgctggtggacctgcgccccaagaaggtcacgggccgcgccgccgaacgcagcctggaacgcgccgggatcaccgcgaacaagaacgcggtgccgttcgacccggaaaagccggcgatcacgtcggggattcgcctgggcagccccgccgccacggcgcgcggcttcggcaccgacgaattccgcgcggtgggcgagatgatcgacgaggtcctgaccgccatggccggcaagggcgaggacggatgccccgccaccgaacaggcggtgcacgacaaggtccgcgccctgtgcgcgcgcttcccgatctatcgctag

SEQ ID NO: 10210 - protein, 440 aa, Gluconacetobacter diazotrophicus PAl 5
MKELENITMPDQMSQSGLHAYFRSPLAERDPLVAEIIAGELERQRDGIELIASENMVSEAVLQAQGSVLTNKYAEGYPGRRYYGGCAEVDKVESLAIERVKTLFGAGFANVQPHSGANANQAAFMALVSPGDTILGMSLAAGGHLTHGAAPNYSGKWFRAVQYGVRREDGLLDYEEMERLARAEKPKLIVAGGSAYPRAIDFARFRAIADEVGAYLMVDMAHYAGLVAAGLYPSPMAHAHVVTSTTHKTLRGPRGGLILTNDADLAKKINSAVFPGLQGGPLMHVIAAKAVAFGEALQPEFRAYQEAVAANARVLAETLLSRGFDIVTGGTDSHLLLVDLRPKKVTGRAAERSLERAGITANKNAVPFDPEKPAITSGIRLGSPAATARGFGTDEFRAVGEMIDEVLTAMAGKGEDGCPATEQAVHDKVRALCARFPIYR

SEQ ID NO: 10211 - DNA, 1272 bp, Sorangium cellulosum 'So ce 56'
  CDS (1)..(1272): transl_table=11
atgagcgtgacaagcgaagtgcagggcctgcgggcgctcaacgaggtcgatccggagatcgccgagctgatccgcctggaagagcggcgggaagcggacacgctccggctcatcgcgagcgagaactacgtgtctcgggcggtgctcgaggcgacgggctcggtgctgacgaacaagtactccgaggggtacccgcacaagcggtattacgagggtcagcagcaggtcgacgtggtcgaggagctcgcgcggacgcgggtggccaagctgttcggggccgaccacgtgaacgtgcagccctactccgggagcccggccaacctggccgtctacctcgcgttcgcgcaggcgaacgacacgatcatgggcctcggcctgcccgcgggcgggcacctgacccacggctggtcggtgagcatcaccgggaagtacttcaagagcgtgccgtacggggttcgcgagagcgatcaccgcatcgacctggatcaggtccgtgacctggcgcgcgcccaccggccgaagctcatctggtgcgggacgacggcgtacccgcgcacgctcgacttcgccgcgttccgggcgatcgccgacgaggtgggggcgatcctggcggcggacatcgcgcacatcgcggggctcgtggccgcgggggtgcacccgtcgccggtgggcatcgccgacgtggtgacgtcgacgacgcacaagaccttccggggcccgcgcggcgcgatgatcctctgcaagaaggagcacgcgggcgcgatcgacaaggcggtgttccccggcctccagggcggtccgcacaaccacacgaccgcggccatcgcggtcgcggcgaaggaggcctcggaggaagggttccgggcctacgcgaggcagatcgtggtgaacgcgcaggcgctcgggcgcgcgctggagtcgcgcggcttccggctcatcaccggcgggaccgacaaccacctcttgctgatcgacatgacgccgaaggggatcgcgggcaagccgtacgcgcaggcgctcgatcgcgcgggcatcgtggcgaactacaactcgatcccgttcgatccgcgcaagccgttcgacccgtcggggctccgcatcggcacgccggcggtgacgtcgcgcgggatgggcgtcgccgagatggagcgcctcgcggcgtggatggatgaggtggcgcagaacgtgaacgacgaggcgcgcatcgcgcgcatcgccgccgaggtcgcggagctctgccgcggcttcccggcgcccggcatccggctctag

SEQ ID NO: 10212 - protein, 423 aa, Sorangium cellulosum 'So ce 56'
MSVTSEVQGLRALNEVDPEIAELIRLEERREADTLRLIASENYVSRAVLEATGSVLTNKYSEGYPHKRYYEGQQQVDVVEELARTRVAKLFGADHVNVQPYSGSPANLAVYLAFAQANDTIMGLGLPAGGHLTHGWSVSITGKYFKSVPYGVRESDHRIDLDQVRDLARAHRPKLIWCGTTAYPRTLDFAAFRAIADEVGAILAADIAHIAGLVAAGVHPSPVGIADVVTSTTHKTFRGPRGAMILCKKEHAGAIDKAVFPGLQGGPHNHTTAAIAVAAKEASEEGFRAYARQIVVNAQALGRALESRGFRLITGGTDNHLLLIDMTPKGIAGKPYAQALDRAGIVANYNSIPFDPRKPFDPSGLRIGTPAVTSRGMGVAEMERLAAWMDEVAQNVNDEARIARIAAEVAELCRGFPAPGIRL

SEQ ID NO: 10213 - DNA, 1230 bp, Acholeplasma laidlawii PG-8A
  CDS (1)..(1230): transl_table=11
atgacattaaaagactatgatcttgaattatttaacgcgattcaaagagaagataacagacaaaaagaacacatcgaattaattgcgtccgaaaactttgtttctgatgcagtgttagaggcacaaggttcaattttaaccaacaaatatgcagaaggctatccaaataaaagatattatggaggttgcgaatttgttgatcaagtagagatactagctcaagataggttaaaacaaatctttaatgcgaagtttgtaaatgtacagcctcattcgggttcacaggctaatgctgctgtttatcaggcactacttagtcccggagacagggttttaggaatggatttaaatgcgggtggtcacttaactcatggttataaattatcattttctggacattattatgaagcacatgcctatggtgtaagtaggtttgatgaaagaattgattatgaagaagtactgaaaattgcaattgaagttaaacctaaaatgattattgcaggtgcgagtgcatatccaagagtcattgattttaaaaagtttagagaaattgcagatacagttggtgcatacttgtttgtagatatggcacatattgcaggactagttgcttgtggattacatccatcaccactaccttatgcagatgttgtcacgtctactacacataaaaccttaagaggtccacgtggtggtattatacttacaaatgatgcaagtattgctaaaaaaatagatcgtgcagtatttcctggccaacaaggtggtccattaatgcacattattgctgcaaaggcggttgcatttaaagaagcactagaccctaactttaaggtatatcaaacacaagtgattaaaaatgctaaagccttaagtgatacattcaaatcacttggatataaattaatttcagatggtacagataatcatttaatcttagtagatgttaaatcaaaattaggtattacaggaagagatgctgaggatgcgctatataaagcaaatatcacaatcaataaaaaccagttaccgtttgatcaagaaaaaccgatgttaacctcaggtataagattaggaacacctgcgatgacaactaagggttttaaagaaaatgagtttattaaagtagcacaacttattgatgaagtgttatcgaatataaacaatgaagaagttatcaataaagttaaaaaagaagtactaaaactaatgaaagatgttaaatga

SEQ ID NO: 10214 - protein, 409 aa, Acholeplasma laidlawii PG-8A
MTLKDYDLELFNAIQREDNRQKEHIELIASENFVSDAVLEAQGSILTNKYAEGYPNKRYYGGCEFVDQVEILAQDRLKQIFNAKFVNVQPHSGSQANAAVYQALLSPGDRVLGMDLNAGGHLTHGYKLSFSGHYYEAHAYGVSRFDERIDYEEVLKIAIEVKPKMIIAGASAYPRVIDFKKFREIADTVGAYLFVDMAHIAGLVACGLHPSPLPYADVVTSTTHKTLRGPRGGIILTNDASIAKKIDRAVFPGQQGGPLMHIIAAKAVAFKEALDPNFKVYQTQVIKNAKALSDTFKSLGYKLISDGTDNHLILVDVKSKLGITGRDAEDALYKANITINKNQLPFDQEKPMLTSGIRLGTPAMTTKGFKENEFIKVAQLIDEVLSNINNEEVINKVKKEVLKLMKDVK

SEQ ID NO: 10215 - DNA, 1260 bp, Chloroflexus aurantiacus J-10-fl
  CDS (1)..(1260): transl_table=11
atgcttgaacatcttcgagcaactgatccgatcatcgccgatctgatcgagcgggaagcgcaacgccagcgccagggtctggagttaatcgccagcgagaactataccagcctggcggtgatggaggcgcagggatcggtcttgaccaataagtacgcagagggtttgcccggtcggcgatattacggtggttgcgagtttgttgacgccatcgagcaactggctattgaacgggcctgtcagttgttcggcacgtcccacgctaatgtgcaaccgcacagtggggcgcaggccaatatcgccgtgtttacggctctgctccagcccggtgataccattctcggtatgcgcctggatcacggtgggcatctgacgcacggtagcccggtcaatttctccggtaagtggtacaacgtccatttctacggtgtggacgcgcaaaccggtcagatcgactatgacgatctggcaagcaaagcacgggcaatccggccaaagctcatcacgtcgggagtaagtgcatacccgcgtatcatcgattttgcccggatgcgtcagatcgccgatgaggttggcgccctgttgatggccgatattgcccatatcgccggtctggtggctgccggcgagcatccatcacccgtcggtcacgctcatgtgattaccacaactacccataagacgttacgcgggccacggggcggcttgatcttgatgggtgatgattttgcgaaacaactcaactcaagcgtcttccccggtacgcagggtgggccattgatgcacgtgatcgccggtaaggcagttgctttcggtgaagcattgcggcctgagttcaggcagtatgcggcgcaaatccgccgcaatgcccgtgcgctggccgagggattgatggcgcaggggctgaccctggttagcggtgggactgataatcatctgatgctggtcgatctgcgcagtacgggcctaaccggcgcacaggcacagcgcgcacttgataaagcggcgattacggtcaacaaaaatgccatccccgatgatccacaaccgccaatgaagacgagtgggattcggatcgggacacccgcggtaacgacccgcggtatgcgcgaaccagagatggctcagattgcggcctggattggcgaggtgctgatgtaccccgatgatgaagcccgcctgaatcggatcgcaggcgaagtcgccgatttgtgccggcatttcccggtgcctgctgatatggtgcaggtacgggggtaa

SEQ ID NO: 10216 - protein, 419 aa, Chloroflexus aurantiacus J-10-fl
MLEHLRATDPIIADLIEREAQRQRQGLELIASENYTSLAVMEAQGSVLTNKYAEGLPGRRYYGGCEFVDAIEQLAIERACQLFGTSHANVQPHSGAQANIAVFTALLQPGDTILGMRLDHGGHLTHGSPVNFSGKWYNVHFYGVDAQTGQIDYDDLASKARAIRPKLITSGVSAYPRIIDFARMRQIADEVGALLMADIAHIAGLVAAGEHPSPVGHAHVITTTTHKTLRGPRGGLILMGDDFAKQLNSSVFPGTQGGPLMHVIAGKAVAFGEALRPEFRQYAAQIRRNARALAEGLMAQGLTLVSGGTDNHLMLVDLRSTGLTGAQAQRALDKAAITVNKNAIPDDPQPPMKTSGIRIGTPAVTTRGMREPEMAQIAAWIGEVLMYPDDEARLNRIAGEVADLCRHFPVPADMVQVRG

SEQ ID NO: 10217 - DNA, 1242 bp, Thermoanaerobacter pseudethanolicus ATCC 33223
  CDS (1)..(1242): transl_table=11
atggatattgaaataataagaaaaactgatccagaaattgcagacgcaattgaaaaagagcttataaggcagagaaataaaatagagcttatagcttctgaaaattttgtaagtagagctgtaatggaagcaatggggtcccctcttactaataaatacgcagaagggtatccaaataaaaggtattacggcggttgcgaatatgtggatatagctgaagagttagcaagagaaaggctcaaaaaactttttggtgctgaacacgcaaatgtacaacctcattcaggagcacaggcaaacatggctgcttattttgctcttataaagccaggagatactgtgctgggaatggatttagcccatggagggcacctcactcatggaagcaaagtcaatttttcaggccaaatctataatttcgtatcttacggagtaagagaagatacaggatatatagattacgatgaagtagaaagagtcgcaaaaaagcacaaacccaaattgattgtcgcaggtgctagcgcttacccaaggataatcgattttaagagatttagagaaattgcagacaaggttggagcttacctaatggtagacatggctcatatagctggtcttgtagcagcaggtcttcatcctaatcctgttccttatgcagatgtcgttacgactaccacccataagactttaagaggcccaagaggaggagctattctttgcaaagaagaatacgcaaaagcaatagacaaagcactcttcccgggcacacaaggtggccctttaatgcatataatagcagcaaaagccgtttgttttaaagaagctctcaccgatgaattcaaagaatatcaaaaaagaattgtcgaaaatgcaaaagctttagcaaatgcattaatggaaagaggaataaatttagtgtcaggtggaaccgataaccacttgatgttgttggatttaagaaacacaggaataacaggcaaagagttagaaacaagattagatgaagtaaacataacttgcaacaaaaatgctataccttttgacccattagggccaaatgtcacttctggtgtgagactgggaactccagctgttacaacaagaggaatgaaacctgaagatatggtagaaatagcggacattatagtcaatgtaataagggatgaaaactataaagaaaaagcaaaagaaagagtagcaaatcttctcaaaaaataccctctttatgaggacctcatataa

SEQ ID NO: 10218 - protein, 413 aa, Thermoanaerobacter pseudethanolicus ATCC 33223
MDIEIIRKTDPEIADAIEKELIRQRNKIELIASENFVSRAVMEAMGSPLTNKYAEGYPNKRYYGGCEYVDIAEELARERLKKLFGAEHANVQPHSGAQANMAAYFALIKPGDTVLGMDLAHGGHLTHGSKVNFSGQIYNFVSYGVREDTGYIDYDEVERVAKKHKPKLIVAGASAYPRIIDFKRFREIADKVGAYLMVDMAHIAGLVAAGLHPNPVPYADVVTTTTHKTLRGPRGGAILCKEEYAKAIDKALFPGTQGGPLMHIIAAKAVCFKEALTDEFKEYQKRIVENAKALANALMERGINLVSGGTDNHLMLLDLRNTGITGKELETRLDEVNITCNKNAIPFDPLGPNVTSGVRLGTPAVTTRGMKPEDMVEIADIIVNVIRDENYKEKAKERVANLLKKYPLYEDLI

SEQ ID NO: 10219 - DNA, 1254 bp, Pseudomonas putida GB-1
  CDS (1)..(1254): transl_table=11
atgttcagccgtgatttgaccattgccaagtacgacgccgagctcttcgaagccatgcagcaagaagccctgcgccaggaagagcatatcgagctgatcgcttcggaaaactacaccagcccggccgtcatggaagctcagggctcggtcctgaccaacaagtacgccgaaggctacccaggcaagcgctactacggtggttgcgagtacgtcgacatcgtcgagcaactggccatcgaccgtgccaaggagctgttcggcgccgactacgccaacgtccagccgcacgctggctcccaggccaacgctgccgtctacctggccctgctgtcggccggtgacaccatcctgggcatgagcctggcccacggtggtcacctgacccacggtgcttcggtaagctcgtcgggcaagctgtacaacgccatccagtacggcatcgacggcaacggcctgatcgactacgacgaagtcgagcgcctggctgtcgagcacaagccaaagatgatcgttgccggcttctcggcctactcgcaggttctggacttcgcccgcttccgcgccatcgccgacaaggtcggtgcctacctgttcgtcgacatggcccacgttgccggcctggttgccgctggcgtgtacccgaacccggtgccgttcgccgacgtggtcaccaccaccacccacaagaccctgcgcggcccacgcggcggcctgatcctggcccgtgccaacgccgacatcgagaagaagctgaactccgctgtcttcccaggcgcccaaggcggcccgctggagcacgtaatcgccgccaaggccatctgcttcaaagaagccctgcaacctgagttcaaggcttaccagcagcaagtcgtgaagaacgcccaggccatggccagcgtgttcatcgagcgtggtttcgacgtggtttccggtggcacccagaaccacctgttcctgctgtcgctgatcaagcaggaaatttccggtaaggacgctgacgctgccctgggcaaagccttcatcaccgtgaacaagaactcggtcccgaacgacccacgttcgccgttcgtcacctcgggcctgcgtttcggcaccccagccgttaccacccgtggtttcaaggaagccgagtgcaaggaactggctggctggatctgcgacatcctggctgacctgaacaacgaagcggtgatcgacgccgtacgtgagaaggtcaaggccatctgcaagaagctgccggtttacggcaactga

SEQ ID NO: 10220 - protein, 417 aa, Pseudomonas putida GB-1
MFSRDLTIAKYDAELFEAMQQEALRQEEHIELIASENYTSPAVMEAQGSVLTNKYAEGYPGKRYYGGCEYVDIVEQLAIDRAKELFGADYANVQPHAGSQANAAVYLALLSAGDTILGMSLAHGGHLTHGASVSSSGKLYNAIQYGIDGNGLIDYDEVERLAVEHKPKMIVAGFSAYSQVLDFARFRAIADKVGAYLFVDMAHVAGLVAAGVYPNPVPFADVVTTTTHKTLRGPRGGLILARANADIEKKLNSAVFPGAQGGPLEHVIAAKAICFKEALQPEFKAYQQQVVKNAQAMASVFIERGFDVVSGGTQNHLFLLSLIKQEISGKDADAALGKAFITVNKNSVPNDPRSPFVTSGLRFGTPAVTTRGFKEAECKELAGWICDILADLNNEAVIDAVREKVKAICKKLPVYGN

SEQ ID NO: 10221 - DNA, 1254 bp, Pseudomonas putida GB-1
  CDS (1)..(1254): transl_table=11
atgttccataaaagcctgaccctgtctgacttcgaccctgcgctgtccgaggccattcgccgagaagtgcaacgccaggaagaccacatcgagctgatcgcctcggaaaactacaccagcccgcaggtgatgcaggcccaaggtaccgaactgaccaacaagtacgccgaaggctacccaggcaagcgctattacggtggctgcgagcatgtcgacgtggtcgagcaactggccatcgagcgtgccaggcaactgttcggcgcgggttacgccaacgtccagccgcactcaggctcgcaggccaacgccgcggtctacctggccttgctgcaggccggggataccctgctgggcatgagcctggcgcacggcggccacttgacccacggcgccaaggtgtcggcttcgggcaagctgtacaacgctgtgcaatacggcatcgatgccaacggcttgatcgactacgacgaggttgagcgcctggccgtcgagcaccagccgaagatgatcgtggcaggcttctcggcctattcgaaaaccctcgacttcccgcgtttccggcagatcgccgacaaggtcggggcctacctgttcgttgacatggcccacgtcgccggcttggtggcggcaggcctgtaccccaatccgctgccttatgccgatgtggtcaccaccaccacccacaagaccctgcgcgggccacggggtggtttgattctggccaaggcggacccggagcttgagaaaaagctcaattcggcggtgttcccaggcgggcagggtgggccgctgatgcatgtgatcgcagccaaggcggtgtgcttcaaggaggccctggaacctggtttcaaggactaccagcgccaggtcgtcaacaacgcacaggccatggcgcaagtcttcatgcagcggggcttcgacgtggtttccgggggcaccgacaaccacctgttcctgcttagcctgatccgccagggcatcaccggcaaggacgccgacgccgcgctgggccgggcgcacatcacggtgaacaagaacgccgtgcctaatgacccacagtcgccgttcgtgacgtcgggcctgcgcattggcaccccggcggtaacgacccgtggtttcaaggaagcggaatgccgggccctggcgacctggatctgcgacatcctcgaccaccttggtgatgccgatgtcgaggcccatgtggcggggcaggtgggcgaactgtgcaagttgttcccggtttatccggcctga

SEQ ID NO: 10222 - protein, 417 aa, Pseudomonas putida GB-1
MFHKSLTLSDFDPALSEAIRREVQRQEDHIELIASENYTSPQVMQAQGTELTNKYAEGYPGKRYYGGCEHVDVVEQLAIERARQLFGAGYANVQPHSGSQANAAVYLALLQAGDTLLGMSLAHGGHLTHGAKVSASGKLYNAVQYGIDANGLIDYDEVERLAVEHQPKMIVAGFSAYSKTLDFPRFRQIADKVGAYLFVDMAHVAGLVAAGLYPNPLPYADVVTTTTHKTLRGPRGGLILAKADPELEKKLNSAVFPGGQGGPLMHVIAAKAVCFKEALEPGFKDYQRQVVNNAQAMAQVFMQRGFDVVSGGTDNHLFLLSLIRQGITGKDADAALGRAHITVNKNAVPNDPQSPFVTSGLRIGTPAVTTRGFKEAECRALATWICDILDHLGDADVEAHVAGQVGELCKLFPVYPA

SEQ ID NO: 10223 - DNA, 1257 bp, Shewanella halifaxensis HAW-EB4
  CDS (1)..(1257): transl_table=11
atgctgaaaaaagatatgaatatcgcggattacgatccacaactatttgcagcaattgaagatgaaacacgccgtcaagaagagcacatcgaactcattgcttcagaaaactacaccagtcctcgcgttcttgaagcccaaggtacgcagctaaccaataagtatgctgaaggttacccgggtaagcgttactatggcggttgtgagcatgtagatattgttgaagagctagcgatttcacgtgctaaagagctatttggtgcaacttatgccaacgttcagccacactctggctcacaagctaacgcagcggtatttatggcgctgcttcaaggtggcgacaccgttctaggtatgagcctagcacacggtggtcacttaactcacggttctcatgtgagtttctctggcaagctatataacgcagttcagtacggtattgatgaaacaaccggcaagattgattacgccgaagttgagcgtctagcggttgagcacaagccaaagatgatcatcgctggtttcagtgcatattcaggcattgttgactggggtaagttccgcgaaatcgctgataaagtaggtgcatacctgtttgttgatatggcgcacgttgcaggtcttgttgctgcaggcatctatccaagcccaatgccacacgctcacgttgtgacaacaacgacgcataagacactcgctggccctcgtggcggcttgatcttatctgcgattaacgatgaagatatctataagaagttaaactcagcggtcttcccaggcggtcagggtggtccattgatgcatgttatcgcggctaaagcggttgcatttaaagaggcgctagatccagagttcaccacttaccaagagcaagtggttgttaacgcaaaggcgatggcacgcactttcatcgagcgtggctacgatgtggtatctggcggcactgacaaccacctattcttgcttgatctaatcagcaaagatattactggtaaagatgctgatgcagctctaggtaatgcgaacatcacagtgaacaagaactctgtacctaatgacccacgttcaccatttgtgacttcaggtcttcgtatcggttctcctgcgattacccgtcgtggctttggtgaagaagagtctgtgcaactcactcactggatgtgcgatatcttagatgatatttcagatcttgccgttagcgagcgtgttaaggctcaggttctggaattgtgcgctaggttccctgtttacggttaa

SEQ ID NO: 10224 - protein, 418 aa, Shewanella halifaxensis HAW-EB4
MLKKDMNIADYDPQLFAAIEDETRRQEEHIELIASENYTSPRVLEAQGTQLTNKYAEGYPGKRYYGGCEHVDIVEELAISRAKELFGATYANVQPHSGSQANAAVFMALLQGGDTVLGMSLAHGGHLTHGSHVSFSGKLYNAVQYGIDETTGKIDYAEVERLAVEHKPKMIIAGFSAYSGIVDWGKFREIADKVGAYLFVDMAHVAGLVAAGIYPSPMPHAHVVTTTTHKTLAGPRGGLILSAINDEDIYKKLNSAVFPGGQGGPLMHVIAAKAVAFKEALDPEFTTYQEQVVVNAKAMARTFIERGYDVVSGGTDNHLFLLDLISKDITGKDADAALGNANITVNKNSVPNDPRSPFVTSGLRIGSPAITRRGFGEEESVQLTHWMCDILDDISDLAVSERVKAQVLELCARFPVYG

SEQ ID NO: 10225 - DNA, 1242 bp, Heliobacterium modesticaldum Ice1
  CDS (1)..(1242): transl_table=11
atgagtgaatggaagcatctgcaccaggtcgaccctgaagtggcggccgccatggaccgggaaaagaagcgccagaaaaacaacattgagctgatcgcttcagagaacttcgtcagcgaggccgtcatggaagcggccggcagcgtattgacgaacaagtatgccgaggggtatccgggaaaacgctactacggcggctgcgaattcgtcgaccaggtggaaaggctggccatcgagcgggccaagcggctcttcggtgccgaacacgccaatgtgcagccccactcgggcgctaacgccaacatgggcgtctacttcgcctgcctcgaaccgggcgatacggttttgggcatgaatctcgcccacggcggccatctcacccacggttcgcctgtcaacatatcggggaagtacttccgcttcgtcgcctacggcgtcgacgcacatacgggtcggatcgactatgacgaggtggcgcgcatcgcccgggagacgaagcccaaattgatcgtcgccggcgccagcgcttacccgcgtgtgctcgattttgcccgcttccgggccatcgccgacgaggtcggggccatgctgatggtcgatatggcccacatcgccggcctggtggcggcgggactgcatccctcgcccgttccttacgccgagtttgtcaccaccaccacccacaagacgctgcgcggtccccgcggcggcatgatcctttgtaaacaggagtgggccgccaaggtcgacaaggccattttccccggcctgcagggcggtcccttgatgcacatcatcgctgccaaggccgtcgccttccaagaggccatggcgccggccttcacggcgtatcagaagcagatcgccgccaacgccgccgccctcgccaaaggcctgaccgaccgaggcttccaactcgtctccggcggcaccgacaaccacctgatgctcgtcgacctgcgcaacaagcagctgaccggcaaggaagcggaaaagcggctcgacgagtgccgaattacggtcaataagaacgcgatccccttcgatccgcagagccccttcgtcaccagcggtatccgtatcggcacgccggccgcgacgagccggggcatggatgaagccgccatggatcaggtggccgaagcgatccacctgtgcctctctgacggcagtgagggagccatgcaaaaggctgtcgccatcgtggacgcgctctgcgcccgtttcccgctctacgcctga

SEQ ID NO: 10226 - protein, 413 aa, Heliobacterium modesticaldum Ice1
MSEWKHLHQVDPEVAAAMDREKKRQKNNIELIASENFVSEAVMEAAGSVLTNKYAEGYPGKRYYGGCEFVDQVERLAIERAKRLFGAEHANVQPHSGANANMGVYFACLEPGDTVLGMNLAHGGHLTHGSPVNISGKYFRFVAYGVDAHTGRIDYDEVARIARETKPKLIVAGASAYPRVLDFARFRAIADEVGAMLMVDMAHIAGLVAAGLHPSPVPYAEFVTTTTHKTLRGPRGGMILCKQEWAAKVDKAIFPGLQGGPLMHIIAAKAVAFQEAMAPAFTAYQKQIAANAAALAKGLTDRGFQLVSGGTDNHLMLVDLRNKQLTGKEAEKRLDECRITVNKNAIPFDPQSPFVTSGIRIGTPAATSRGMDEAAMDQVAEAIHLCLSDGSEGAMQKAVAIVDALCARFPLYA

SEQ ID NO: 10227 - DNA, 1242 bp, Lysinibacillus sphaericus C3-41
  CDS (1)..(1242): transl_table=11
atggcatatgaaaaattagcagtacaagacaaagcagtattagaaggaattcttgcagaaaaaaaacgtcaacaagcaaatatcgaattgattgcatctgaaaattttgtatccgaagcagttatggaagcgcaaggttctgtactgacaaataaatacgcagaaggttatccaggtaaacgctactatggtggctgtgaacatgtagacgtagttgaagatattgcacgtgatcgtgtgaaagaaatctttggtgcagaatacgcaaacgtgcaaccacactctggtgcgcaagcaaatatggctgtataccacacaattttagaaccaggcgatacggttcttggtatgaacctttctcatggtggtcacttaacacatggatctcctgtaaacttctctggtattctttataattttgtggaatatggtgtaacaaaggacacacaagttatcgattatgaggatgtacgtcaaaaagcattagaacataagccgaaacttatagttgcgggagcttctgcgtacccacgtgaaattgacttctctaaattccgtgaaatcgcagatgaagtaggtgcatacttcatggtggatatggcacacatagctggtcttgtagctgtcggtgagcatcaatcgccagttccatatgcagactttgttacatcgactacacataaaacattacgtggaccacgtggcggattaattcttgcatcgaaagaatgggagcaaaaattaaacaagtctgtattcccaggaattcaaggtgggccattaatgcatgtcattgctgctaaagctgtagcatttggcgaagtactgcaaccagaatttaaagactatgcaaaacaaataaaattgaatgcaaaagctttagccgaagtccttattgctgagggtgttgaaattgtatctggcggtacagataaccacttattactattaaacgttaaatctcttggtctgacaggtaaagtagcagaacatgcattagatgaagtgggtattacaactaacaaaaacacaatcccttacgatacggagtctccatttgttacttcaggtattcgtatcggtacaccagctgttacatctcgtggctttaaagaggaagatatgaaagaagtgggtgcaattattgcagcagttcttaaaaaccctgaagatgaagcagttaaagcggacgcaaaagatcgcgtaaaagcattaacagataaacatccattatacgcttaa

SEQ ID NO: 10228 - protein, 413 aa, Lysinibacillus sphaericus C3-41
MAYEKLAVQDKAVLEGILAEKKRQQANIELIASENFVSEAVMEAQGSVLTNKYAEGYPGKRYYGGCEHVDVVEDIARDRVKEIFGAEYANVQPHSGAQANMAVYHTILEPGDTVLGMNLSHGGHLTHGSPVNFSGILYNFVEYGVTKDTQVIDYEDVRQKALEHKPKLIVAGASAYPREIDFSKFREIADEVGAYFMVDMAHIAGLVAVGEHQSPVPYADFVTSTTHKTLRGPRGGLILASKEWEQKLNKSVFPGIQGGPLMHVIAAKAVAFGEVLQPEFKDYAKQIKLNAKALAEVLIAEGVEIVSGGTDNHLLLLNVKSLGLTGKVAEHALDEVGITTNKNTIPYDTESPFVTSGIRIGTPAVTSRGFKEEDMKEVGAIIAAVLKNPEDEAVKADAKDRVKALTDKHPLYA

SEQ ID NO: 10229 - DNA, 1254 bp, Acinetobacter baumannii SDF
  CDS (1)..(1254): transl_table=11
atgtttgccaatatttccatttctgaatttgatccagaattagctcaagcaattgcttctgaagatgagcgtcaagaagcacatatcgagttaattgcatctgaaaactattgctctcctgcggtaatggaagcgcaaggatcaaaacttacgaacaaatacgcagaaggttatcctggcaaacgctattatggcggttgcgaatttgtagatgttattgagcaaatggcgattgaccgtgctaaagaactttttggtgcagattacgcaaacgttcaaccacacgctggctcacaagctaactctgctgtttatctagcgcttcttaacccaggcgatacagttttaggtatgagcttggctcacggtggtcacttgactcacggtgcaaaagttagcttctctggtaaaacgtataacgctgttcagtatggtttaaatgctgaaactggtgagattgattacgaagaagttgaacgtttagcattggaacacaagccacgtatgatcgttgctggtttctctgcttatagccgtgttgtggattggcaacgtttccgtgacatcgcggacaaagttggtgcttacctttttgttgatatggctcacgttgctggtcttgttgctgctggtgtgtatccaaacccagttcaaattgctgacgtaacaacaacgacgactcacaaaacgcttcgtggtccacgttctggtttaatccttgcgaaagcgaatgaagaaatcgagaaaaaacttcaatcagctgtattccctggtaaccaaggtggtccattaatgcatgcgattgctgctaaagcaatctgcttcaaagtagcaatgtctgatgactttaaagcttaccaaaaacaagttgtgaaaaatgctcaagcaatggctgaagtattcatcgcacgtggttatgatgtggtttctggtggtacagacaaccacttattcttgttatctttaatcaaacaagacgtaactggtaaagatgcagacgcttggttaggtgctgctcacattactgtgaacaaaaactcagttccaaatgacccacgttctccatttgtgacttctggtatccgtatcggtactccagcagtaacaactcgtggttttggtgaaactgaagttcgtgaacttgctggttggatcgctgacgtgattgatagcaaaggtgacgaaaaagttattgctgatgtaaaagcaaaagttgaagctgtttgtgcaaaattccctgtatatgcaaaataa

SEQ ID NO: 10230 - protein, 417 aa, Acinetobacter baumannii SDF
MFANISISEFDPELAQAIASEDERQEAHIELIASENYCSPAVMEAQGSKLTNKYAEGYPGKRYYGGCEFVDVIEQMAIDRAKELFGADYANVQPHAGSQANSAVYLALLNPGDTVLGMSLAHGGHLTHGAKVSFSGKTYNAVQYGLNAETGEIDYEEVERLALEHKPRMIVAGFSAYSRVVDWQRFRDIADKVGAYLFVDMAHVAGLVAAGVYPNPVQIADVTTTTTHKTLRGPRSGLILAKANEEIEKKLQSAVFPGNQGGPLMHAIAAKAICFKVAMSDDFKAYQKQVVKNAQAMAEVFIARGYDVVSGGTDNHLFLLSLIKQDVTGKDADAWLGAAHITVNKNSVPNDPRSPFVTSGIRIGTPAVTTRGFGETEVRELAGWIADVIDSKGDEKVIADVKAKVEAVCAKFPVYAK

SEQ ID NO: 10231 - DNA, 1248 bp, Candidatus Desulforudis audaxviator MP104C
  CDS (1)..(1248): transl_table=11
atggtctggaaccggtccctggccgaaaccgaccccgaaatcgcccgggccatcgcgctggagatcacccgtcaaggcgccaagcttgagctgatcgcctccgagaacttcgtcagccgcgccgtcctggaagcccagggttcggtgctgacgaacaagtacgccgagggctatcccggcgcgcgctactacggcggctgcgagtacgtggacatcgtggagagtgtggcgatcaggcgggcgaaggaaatcttcggcgccgggcacgcgaacgtgcagccccactccggggcccaggccaacatggccgcctatttcgccttcctcgaaccgggcgacacgatcatggggatgcgtctggcccacggggggcacctgacccacggcgcgaagatcaatttctcgggccggtacttccggtacgtgccctacggggtggaggaggaaaccggccggattgactacgaccggatgcatgccatcgcccgcgaacaccgcccgaaactgatcgtcggcggggccagcgcctacccgcgcgaactggacttcgcccggatgcgtgccattgcggatgacgtcggtgcgctcttgatgatcgacatggcgcacattgccggcctgatcgccgccggactgcacatgtccccggtgccgtacgccgacgtggtgaccaccacgacccacaaaaccctgcgcggcccgcggggcgggatgatcctgtgcccggaggagtacgccgccgccattgacaaggcggtattcccgggaatccagggcggccctctgatgcacgtgatcgcggccaaggccgtggccctgggcgaggctcagcgccccgagttcaagacctaccaggaacaaatcgtgaaaaacgcccgcgccttagcccaagccctgcaggagcggggttttgagctggtggcgggcggcaccgacacccacctgatcctggtcgacctccggaacaagggcctcaccggcgccgtggccgaggaccttctggaccgggtggacgtcaccgtgaacaagaacatggttccgttcgatccccagccgccccgggtcaccagcggcatccgcatcggcaccccggcggtcaccacccgcgggatgaaggaggacagcatggtccagatcgccgaggtgatcagcctgactctggatcatccggaagaaggggccgtccaggcgcgggcgaaagccattgttgccgaattgtgcgccgcccacccgttcctgaaactgtag

SEQ ID NO: 10232 - protein, 415 aa, Candidatus Desulforudis audaxviator MP104C
MVWNRSLAETDPEIARAIALEITRQGAKLELIASENFVSRAVLEAQGSVLTNKYAEGYPGARYYGGCEYVDIVESVAIRRAKEIFGAGHANVQPHSGAQANMAAYFAFLEPGDTIMGMRLAHGGHLTHGAKINFSGRYFRYVPYGVEEETGRIDYDRMHAIAREHRPKLIVGGASAYPRELDFARMRAIADDVGALLMIDMAHIAGLIAAGLHMSPVPYADVVTTTTHKTLRGPRGGMILCPEEYAAAIDKAVFPGIQGGPLMHVIAAKAVALGEAQRPEFKTYQEQIVKNARALAQALQERGFELVAGGTDTHLILVDLRNKGLTGAVAEDLLDRVDVTVNKNMVPFDPQPPRVTSGIRIGTPAVTTRGMKEDSMVQIAEVISLTLDHPEEGAVQARAKAIVAELCAAHPFLKL

SEQ ID NO: 10233 - DNA, 1284 bp, Thermotoga sp. RQ2
  CDS (1)..(1284): transl_table=11
atgtggaaacatgtaaaacaggttgatcccgaaatatacgaagttcttgtgaacgagttgaagcgtcaagagtacggcctggagctgatcgcctctgagaacttcgcgtcactcgctgtcatagaaaccatgggaagcatgctcaccaacaagtacgcggaaggatacccgcagaagaggtactacggtggctgcgaatgggtggatcgagcagaagaactcgctatagagagagcgaagaggttgtttggagccaaatttgcgaacgttcagccgcactccggttctcaggcgaacatggcggtttatctggcactcgcccagcccggagacacgatcatgggaatgtccctgtctcacgggggacacctcacccatggagcgccggtgaatttctcagggaagatcttcaaggtggtaccctacggagtcaatctggaaacggaaacgatagattacgatgaggtcagaagactcgccctggaacacaagccaaagataatcgttgcgggtggaagtgcttacgccaggatcatcgatttcaaaagattcagagagatagccgatgaggtgggagcatatttgatggtggatatggctcactttgccggactcgtcgctgcaggaattcatccgaatcctttggagtacgcccatgtggtgacttctaccacacacaagaccctcaggggacccagaggtggtttgatactcacgaatgatccggatatcgccaaagccgtggataaaaccatcttccctggcattcagggcggtcctctcatgcacgtcatagcggcgaaagccgtctgtttcaaagaagccatgacggaggagttcaaagagtaccaaaatcaggtggtcaaaaatgctaaaaagatggctgaagagttccagaaacgaggttacaggatcgtttctggaggaactgatacacacttgttcctggtggatctcacaccaaaagacataacgggtaaagcggcggaaaaggccctggaaagctgtggtatcacagtgaacaaaaacaccattcccaacgaaaagagatctccgttcgtggcgagcggtatcagaataggaacacccgctgttacaacccgcggaatgaaggaagaagagatggaagagatcgccgagatgatagacctggttctttcaaacgtgaccgatgaaaacggaacggtgaaaccagaggtgagggaagaggtttcaaagagggtaagggagctctgcgaaaggtttcctctgtaccgcgacaagatcgaaggggtggaaatatga

SEQ ID NO: 10234 - protein, 427 aa, Thermotoga sp. RQ2
MWKHVKQVDPEIYEVLVNELKRQEYGLELIASENFASLAVIETMGSMLTNKYAEGYPQKRYYGGCEWVDRAEELAIERAKRLFGAKFANVQPHSGSQANMAVYLALAQPGDTIMGMSLSHGGHLTHGAPVNFSGKIFKVVPYGVNLETETIDYDEVRRLALEHKPKIIVAGGSAYARIIDFKRFREIADEVGAYLMVDMAHFAGLVAAGIHPNPLEYAHVVTSTTHKTLRGPRGGLILTNDPDIAKAVDKTIFPGIQGGPLMHVIAAKAVCFKEAMTEEFKEYQNQVVKNAKKMAEEFQKRGYRIVSGGTDTHLFLVDLTPKDITGKAAEKALESCGITVNKNTIPNEKRSPFVASGIRIGTPAVTTRGMKEEEMEEIAEMIDLVLSNVTDENGTVKPEVREEVSKRVRELCERFPLYRDKIEGVEI

SEQ ID NO: 10235 - DNA, 1254 bp, Pseudomonas putida W619
  CDS (1)..(1254): transl_table=11
atgttcagccgtgatttgaccattgccaagtacgacgccgagctcttcgaagccatgcagcaagaagctctgcgccaggaagagcatatcgagctgatcgcttcggaaaactacaccagcccagccgtcatggaagcccagggttcggtcctgaccaacaagtacgccgaaggctacccgggcaagcgttactacggtggttgcgagtacgtcgacgtggtcgagcaactggccatcgaccgcgccaaggagctgttcggcgccgactacgccaacgttcagccgcacgccggctcccaggccaacgccgctgtctacctggccctgctgtcggccggtgacaccatcctgggcatgagcctggcccacggtggccacctgacccacggtgcttcggtaagctcctcgggcaagctgtacaacgccatccagtacggcatcgatgccaacggcctgatcgactacgacgaagtcgagcgcctggccgtcgagcacaagccgaaaatgatcgttgccggcttctcggcctactcgcaggtcctggacttcccgcgcttccgcgccatcgccgacaaagtaggtgcctacctgttcgtcgacatggcccacgttgccggcctggttgccgctggcgtgtacccgaacccggtgccgttcgccgacgtggtcaccaccaccacccacaagaccctgcgcggcccgcgtggcggcctgatcctggcccgtgccaacgccgacatcgagaagaagctgaactccgccgtcttcccgggcgcccagggcggcccgctggagcacgtcatcgcggccaaggccatctgcttcaaggaagccctgcagcctgagttcaaggcttaccagcagcaagtggtgaagaacgcccaggccatggccagcgtgttcatcgagcgtggtttcgacgtcgtttccggcggcacccagaaccacctgttcctgctgtcgctgatcaagcaggaaatctccggtaaggacgctgacgccgccctgggcaaagccttcatcaccgtcaacaagaactcggtacctaacgacccacgttccccgttcgtgacctcgggcctgcgtttcggcaccccggccgtcaccacccgcggcttcaaagaagccgagtgtaaagaactggccggctggatctgcgacatcctcgccgacctgaacaacgacgccgtcatcgacgccgtacgtgaaaaggtcaaggccatctgcaagaagctgccggtgtacggcaactga

SEQ ID NO: 10236 - protein, 417 aa, Pseudomonas putida W619
MFSRDLTIAKYDAELFEAMQQEALRQEEHIELIASENYTSPAVMEAQGSVLTNKYAEGYPGKRYYGGCEYVDVVEQLAIDRAKELFGADYANVQPHAGSQANAAVYLALLSAGDTILGMSLAHGGHLTHGASVSSSGKLYNAIQYGIDANGLIDYDEVERLAVEHKPKMIVAGFSAYSQVLDFPRFRAIADKVGAYLFVDMAHVAGLVAAGVYPNPVPFADVVTTTTHKTLRGPRGGLILARANADIEKKLNSAVFPGAQGGPLEHVIAAKAICFKEALQPEFKAYQQQVVKNAQAMASVFIERGFDVVSGGTQNHLFLLSLIKQEISGKDADAALGKAFITVNKNSVPNDPRSPFVTSGLRFGTPAVTTRGFKEAECKELAGWICDILADLNNDAVIDAVREKVKAICKKLPVYGN

SEQ ID NO: 10237 - DNA, 1254 bp, Pseudomonas putida W619
  CDS (1)..(1254): transl_table=11
atgttcagcaagcaagaccagatccagggttacgacgacgcactgctggcggcgatgaatgccgaagaacagcgccaggaagatcacatcgagctgatcgcctcggagaactacaccagcaagcgcgtcatgcaggcccaaggcagcggcctgaccaacaagtacgccgaaggctacccaggcaagcgctactacggtggctgcgagcacgtcgacaaagtcgaggcgctggccatcgagcgcgccaagcagctgttcggtgccgactacgccaacgttcagccacattccggctcttcggccaacagcgccgtgtatctggctctgctgcaggccggtgacaccatcctgggcatgagcctggcccacggcggccacctgacccacggcgccaaagtgtcgtcctcgggcaagctgtacaacgcggtgcaatacggcatcgacaccaacaccggtctgatcgactacgacgaagtcgagcgcctggccgtcgagcacaagccgaagatgatcgttgccggcttctcggcctattccaagaccctcgacttcccgcgttttcgcgccatcgcagacaaggtcggtgcgctgttgttcgtcgacatggcccacgttgccggcctggttgccgctggcctgtacccgaacccgatcccgttcgccgacgtggtgaccaccactacccacaagaccctgcgcggcccacgtggcggcctgatcctggccaagtcgaacgaagagatcgagaaaaagctcaacgccgccgtcttccccggcgcccagggcggcccgctgatgcacgtcatcgcagccaaggctgtgtgcttcaaggaagctcaggagcctgagttcaagagctaccagaagcaggtcatcgagaacgcccaggccatggcccaagtgttcatcgaccgcggctacgacgtggtctccggcggtaccgacaaccacctgttcctggtcagcctgatccgccagggcctgaccggcaaagatgccgacgctgccttgggccgcgcgcacatcaccgtcaacaaaaacgctgtgccgaacgacccgcagtcgccgttcgtcacttccggcctgcgcatcggcaccccggctgtcaccacacgcggcttcaaggtcgcccagtgtgtggccctggccggctggatctgcgacatcctcgataacctcggtgacgctgatgtcgaagccgatgtggcgaagaacgtcgcggctctgtgcacagacttccctgtttaccgctga

SEQ ID NO: 10238 - protein, 417 aa, Pseudomonas putida W619
MFSKQDQIQGYDDALLAAMNAEEQRQEDHIELIASENYTSKRVMQAQGSGLTNKYAEGYPGKRYYGGCEHVDKVEALAIERAKQLFGADYANVQPHSGSSANSAVYLALLQAGDTILGMSLAHGGHLTHGAKVSSSGKLYNAVQYGIDTNTGLIDYDEVERLAVEHKPKMIVAGFSAYSKTLDFPRFRAIADKVGALLFVDMAHVAGLVAAGLYPNPIPFADVVTTTTHKTLRGPRGGLILAKSNEEIEKKLNAAVFPGAQGGPLMHVIAAKAVCFKEAQEPEFKSYQKQVIENAQAMAQVFIDRGYDVVSGGTDNHLFLVSLIRQGLTGKDADAALGRAHITVNKNAVPNDPQSPFVTSGLRIGTPAVTTRGFKVAQCVALAGWICDILDNLGDADVEADVAKNVAALCTDFPVYR

SEQ ID NO: 10239 - DNA, 1257 bp, Shewanella woodyi ATCC 51908
  CDS (1)..(1257): transl_table=11
atgctgaaaaaagatatgaatatcgcggactttgatccacaactgtttcaagcgattcaagatgagactcgtcgtcaagaagagcacatcgaacttatcgcttcagaaaattacaccagtccacgtgttctggaagctcaaggttctcagctgactaacaagtacgccgaaggctaccctggtaagcgttactacggcggttgtgagcatgttgatattgctgaagagttagcgatttctcgtgctaaagagctgtttggtgctacctatgctaacgttcaaccacactctggttcacaagcaaacgcagctgtatttatggcgctgcttgaaggcggtgatacagtactaggcatgagcctagctcatggtggtcacctgactcacggctcacacgttagcttctctggtaagctttataactctgttcaatatggtattgacgaaacaacaggtaagatcgattacgctgaagttgagcgtcttgctgttgagcataagccaaagatgattatcgcaggtttcagtgcttactcaggtatcattgattggggcaagttccgtgagattgcagacaaagtaggtgcttacctgtttgttgatatggctcacgtagcgggtctaatcgcagcgggtatctatccaaatccgcttccacatgcccatgttgtgacaaccacaactcataagacacttgcaggccctcgtggtggtctaattctttctgcaattgatgatgaagctatctacaagaagctgaactctgccgttttccctggtggccaaggtggtcctttaatgcatgttatcgctgctaaagcggttgcatttaaagaggcgttagagcctgagttcaccgcttaccaagagcaggttgtagttaatgcgcaggcgatggctaaaacctttatcgaacgtggctatgatgttgtgtcgggcggtacagataaccatctgttcttgcttgatttaatcagcaaagatatcacaggtaaagatgctgatgcagcgctaggtcttgctaacattactgttaacaaaaactcagtaccaaacgatccgcgctcaccatttgtgacctcaggtctgcgtatcggttctccagcaatcactcgccgtggctttaaagaagcgcaagcggttgaactgactaattggatgtgtgatgtgctagatgacattactaacgaaggaacaattgagcgtgttaagaaccaggttcttgaattgtgcgctaagttccctgtttacggttaa

SEQ ID NO: 10240 - protein, 418 aa, Shewanella woodyi ATCC 51908
MLKKDMNIADFDPQLFQAIQDETRRQEEHIELIASENYTSPRVLEAQGSQLTNKYAEGYPGKRYYGGCEHVDIAEELAISRAKELFGATYANVQPHSGSQANAAVFMALLEGGDTVLGMSLAHGGHLTHGSHVSFSGKLYNSVQYGIDETTGKIDYAEVERLAVEHKPKMIIAGFSAYSGIIDWGKFREIADKVGAYLFVDMAHVAGLIAAGIYPNPLPHAHVVTTTTHKTLAGPRGGLILSAIDDEAIYKKLNSAVFPGGQGGPLMHVIAAKAVAFKEALEPEFTAYQEQVVVNAQAMAKTFIERGYDVVSGGTDNHLFLLDLISKDITGKDADAALGLANITVNKNSVPNDPRSPFVTSGLRIGSPAITRRGFKEAQAVELTNWMCDVLDDITNEGTIERVKNQVLELCAKFPVYG

SEQ ID NO: 10241 - DNA, 1248 bp, Burkholderia cenocepacia MC0-3
  CDS (1)..(1248): transl_table=11
atgtttgacagagcccaaagcaccatcgcgaacgtcgatcccgaaatctttgcagcgatcgagcaggaaaaccgccgccaggaagatcacatcgagctgatcgcgtcggaaaactacacgagcccggccgtgatggccgcgcagggctcgcagctcacgaacaagtacgcggaagggtatccgggcaagcgctactacggcggttgcgagtacgtcgacgtggtcgagcaactggcgatcgaccgtgtgaagcagctgttcggtgcggaagcggcgaacgtgcagccgaactcgggttcgcaggcgaaccagggcgtgttcttcgcgatgctcaagccgggcgacacgatcatgggcatgagcctcgcgcacggcggccacctgacgcacggctcgccggtgaacatgtcgggcaagtggttcaacgtggtgagctacggcctgaacgaaaacgaagacatcgactacgaagcggccgagaagctcgcgcaggaacacaagccgaagctgatcgtcgcgggcgcgtcggcgtttgcgctgaagatcgatttcgagcgtctggcgaagatcgcgaagtcggtgggcgcgtatctgatggtcgacatggcgcactacgctggcctgatcgcggcgggcgtgtacccgaacccggtgccgcacgcggatttcgtgacgacgacgacgcacaagagcctgcgcggcccgcgtggcggcgtgatcctgatgaaggccgagtacgagaagccgatcaactcggcgatcttcccgggcatccagggcggcccgctgatgcacgtgatcgcggcaaaggcggtggcgttcaaggaagcgctctcgccggagttcaaggaatatcagcagaaggtggtcgagaacgcacgcgtgctggccgaaacgctggtcaagcgcgggctgcggatcgtgtcgggccgcaccgaaagccacgtgatgctggtcgacctgcgcgcgaagaacatcacgggcaaggcagcggaagcagcgctcggcgcggcgcacatcacggtgaacaagaacgcgatcccgaacgatccggaaaagcctttcgtgacgagcggcgtgcgcctgggttcgccggcgatgacgacgcgtggcttcgggccggcagaagccgagcaggtgggtaacctgatcgccgacgtgctggagaacccggaggacgcagcgacgatcgagcgcgtgcgtgtgcaggtcgccgagctgaccaagcgtttcccggtctatcgctga

SEQ ID NO: 10242 - protein, 415 aa, Burkholderia cenocepacia MC0-3
MFDRAQSTIANVDPEIFAAIEQENRRQEDHIELIASENYTSPAVMAAQGSQLTNKYAEGYPGKRYYGGCEYVDVVEQLAIDRVKQLFGAEAANVQPNSGSQANQGVFFAMLKPGDTIMGMSLAHGGHLTHGSPVNMSGKWFNVVSYGLNENEDIDYEAAEKLAQEHKPKLIVAGASAFALKIDFERLAKIAKSVGAYLMVDMAHYAGLIAAGVYPNPVPHADFVTTTTHKSLRGPRGGVILMKAEYEKPINSAIFPGIQGGPLMHVIAAKAVAFKEALSPEFKEYQQKVVENARVLAETLVKRGLRIVSGRTESHVMLVDLRAKNITGKAAEAALGAAHITVNKNAIPNDPEKPFVTSGVRLGSPAMTTRGFGPAEAEQVGNLIADVLENPEDAATIERVRVQVAELTKRFPVYR

SEQ ID NO: 10243 - DNA, 1242 bp, Clostridium botulinum B1 str. Okra
  CDS (1)..(1242): transl_table=11
atggactttacaaatttaaaaaacacagatccagagctattagacatgataaagaaagaagaggaaagacaagaatataatatcgaattaatagcttcagaaaattttactagtttatctgtaatggaggctatgggatctttattgacaaataaatatgcagaaggatacccacataaaagatattatggaggatgtgaatttgtagatgaggtagaggatttagcaagagaaagattaaaaaaattatttgttgcagaacatgccaatgtacaaccacattctggttcacaagccaatatggcagtttatatgtctgtgcttcagactggtgatactatattaggtatggatttatcccatggcggacatttaacccatggaagtccagtaaatttttcaggaaaattatataattttatatcctatggtgtagataaagaaacagaaactatagattatgatcaattaaagaaaatagccttagaaaatagacctaaaatgatagtatctggagctagtgcttatcctagaattatagattttgaaaagataagagaaatttgtgatgaaatagatgcttatatgatggtagatatggctcatatagcaggattagtagctacaggaatacatccatcaccagtaccttatgcagattttgttacaacaactactcataaaactttaagaggacctagaggtggggctattttatgtaaagaaaaatatgcaaaagcagtagataaagctatattcccaggcattcaagggggaccattaatgcatactatagcagcaaaagccgtttgttttggggaagctttaagagaagattataaagaatatatgcagcaagttgttaaaaatactaaagttttaggagaagaattaaaaaattatggatttagactaatatctggtggtacagataaccatttattactaatagatttaactaataaaaatataacaggaaaagatgcagaaaaacttttagattcagtaggaattactgtgaataaaaatacaataccttttgaaactttaagcccttttataactagtggaattagaataggaactccagcggtaactacgagaggatttaaggaagaggaaatgaaaaaaatagcctatttcatgaattattctatagaacatagggaagagaatttatctcaaataaaagagcaaataaaagaaatttgtaaaaaatacccattgcatcaaaatgcataa

SEQ ID NO: 10244 - protein, 413 aa, Clostridium botulinum B1 str. Okra
MDFTNLKNTDPELLDMIKKEEERQEYNIELIASENFTSLSVMEAMGSLLTNKYAEGYPHKRYYGGCEFVDEVEDLARERLKKLFVAEHANVQPHSGSQANMAVYMSVLQTGDTILGMDLSHGGHLTHGSPVNFSGKLYNFISYGVDKETETIDYDQLKKIALENRPKMIVSGASAYPRIIDFEKIREICDEIDAYMMVDMAHIAGLVATGIHPSPVPYADFVTTTTHKTLRGPRGGAILCKEKYAKAVDKAIFPGIQGGPLMHTIAAKAVCFGEALREDYKEYMQQVVKNTKVLGEELKNYGFRLISGGTDNHLLLIDLTNKNITGKDAEKLLDSVGITVNKNTIPFETLSPFITSGIRIGTPAVTTRGFKEEEMKKIAYFMNYSIEHREENLSQIKEQIKEICKKYPLHQNA

SEQ ID NO: 10245 - DNA, 1248 bp, Leptothrix cholodnii SP-6
  CDS (1)..(1248): transl_table=11
atgtttgaccgcgccacccagaccctggctgccatcgaccccgaaatcaccgctgcgatcgacgccgaagtgcgtcgccaggaagagcacatcgagctcatcgccagcgaaaactacacctcgccggccgtgatggccgcgcagggctcgcagctgaccaacaagtacgccgaaggttatccgggcaagcgctactacggcggctgcgaacacgtcgacgtggtcgagcaactcgccatcgaccgcgccaagcagctgttcggcgcacaaaacgccaacgtgcagcccaactccggctcgcaggccaaccaggccgtgttcttcggcctgctgcagcccggcgacaccatcatgggcctgagcttggccgaaggtggccacctgacccacggcatgccgctgaacatgtcgggcaagtggttcaaggtcgtctcctacggcctcgacgcccaggaagacatcgactacgacgcgatggagcgtctggcccacgagcacaagcccaagctgatcatcgccggcgcctcggcgtttgcgctgcgcatcgacttcgagcgcttcgccaaggtcgccaaggcggtcggtgcctatttcatggtcgacatggcgcactacgccggcctgatcgccgcaggcgtctacccgaacccggtgccgtttgccgacgtcgttaccaccaccacccacaagaccctgcgcggcccgcgtggcggcctgatcctgatgaccgacgcggtcgccaagcagatcaacagcgcgatcttccccggcatccagggcggccccctgatgcacgtgatcgccggcaaggcggtggcatttcaagaggcgctgcagcccgagttcaaggcctaccaggaacaggtggtcaagaacgcgaccgcgatggctgaaaccttgactgcacgcggcctgcgcatcgtctcgggccgcaccgagagccacgtgatgctggtcgacctgcgccccaagggcatcaccggcaaggaagccgaggcgctgctgggccgggcccacatcacctgcaacaagaacggcatccccaacgacccgcagaagccgatggtcaccagcggcatccgcctgggttcgccggcgatgacgacgcgcggcttcaaggaagaacaggccgtgctgaccgccaacctgatcgccgatgtgctcgaagcgcccaacgacgaagccgtgctcgagcgcgtgcgtgcccaggttgcgcaactcacgcgcgacttcccggtgtatcggtga

SEQ ID NO: 10246 - protein, 415 aa, Leptothrix cholodnii SP-6
MFDRATQTLAAIDPEITAAIDAEVRRQEEHIELIASENYTSPAVMAAQGSQLTNKYAEGYPGKRYYGGCEHVDVVEQLAIDRAKQLFGAQNANVQPNSGSQANQAVFFGLLQPGDTIMGLSLAEGGHLTHGMPLNMSGKWFKVVSYGLDAQEDIDYDAMERLAHEHKPKLIIAGASAFALRIDFERFAKVAKAVGAYFMVDMAHYAGLIAAGVYPNPVPFADVVTTTTHKTLRGPRGGLILMTDAVAKQINSAIFPGIQGGPLMHVIAGKAVAFQEALQPEFKAYQEQVVKNATAMAETLTARGLRIVSGRTESHVMLVDLRPKGITGKEAEALLGRAHITCNKNGIPNDPQKPMVTSGIRLGSPAMTTRGFKEEQAVLTANLIADVLEAPNDEAVLERVRAQVAQLTRDFPVYR

SEQ ID NO: 10247 - DNA, 1245 bp, Polynucleobacter necessarius subsp. necessarius STIR1
  CDS (1)..(1245): transl_table=11
atgtttgaccgtcaaaacaccttagccaaaaccgatccccagttgtgggaagccattcagaacgaaaataagcgtcaagaagaccatattgagctgattgcctctgagaactacacctctccagcggtgatggcggcccagggctctcagttgaccaataagtatgctgaaggctacccaggcaagcgttattacggtggctgtgaattcatagatgtagctgagcaattagcgatcgatcgtgtcaaagccttgtttggtgctgaagcagcaaacgttcaaccccattgcggcgcgtctgcaaaccaagctgtatttttagcattcttaaaaccaggcgatacctttatgggtatgagtctggctgagggcggtcacttgacccacggtatggctttgaacatgagcggtaagtggtttaacccaattgcttatggccttgataaaaatgaagagattgattacgagcagatggagcgtttagctcgtgaacacaaaccaaaattgattattgctggcgcatctgcttactcaaagaaaattgattttgagcgcatcggtaaattagcaaaagaagtcggcgccatctttatggtggatatggctcactacgctggtttggttgctgcaggcgtttatccaaatcctgtgccgcatgctgacatcgttacctcaactacccacaagagtttgcgcggtcctcgtggcggcattatcttgatgaaagctgaacacgagaaagccattaactttgcagtgttcccgggcttacagggtggccctttgatgcatgtgattgctgctaaagcagtggcatttaaagaagcagctgagccaggtttcaaggattatcaaaagcaagtcgttgcaaatgcaaaagcacttgctgagactttgattgctcgtggtttgcgcattgtttctggcggtacagattctcatgtgatgttggtggatttacgtgccaagagcatgactggtaaagaagctgagcgcgtattaggtgaagcgcatatcacttgcaacaaaaatggtattccgaatgatccagaaaaaccaatggtgactagcggcattcgtttgggttcccctgcaatgacaacgcgtggatttaaagaggcggaagcaagacaagtgggtaactttattgctgacgttttagataatccaaatgatcctgcgaacatcgctaaagtgcgcgcgcaagttgctgagctcactaagcgtttcccagtttacgattaa

SEQ ID NO: 10248 - protein, 414 aa, Polynucleobacter necessarius subsp. necessarius STIR1
MFDRQNTLAKTDPQLWEAIQNENKRQEDHIELIASENYTSPAVMAAQGSQLTNKYAEGYPGKRYYGGCEFIDVAEQLAIDRVKALFGAEAANVQPHCGASANQAVFLAFLKPGDTFMGMSLAEGGHLTHGMALNMSGKWFNPIAYGLDKNEEIDYEQMERLAREHKPKLIIAGASAYSKKIDFERIGKLAKEVGAIFMVDMAHYAGLVAAGVYPNPVPHADIVTSTTHKSLRGPRGGIILMKAEHEKAINFAVFPGLQGGPLMHVIAAKAVAFKEAAEPGFKDYQKQVVANAKALAETLIARGLRIVSGGTDSHVMLVDLRAKSMTGKEAERVLGEAHITCNKNGIPNDPEKPMVTSGIRLGSPAMTTRGFKEAEARQVGNFIADVLDNPNDPANIAKVRAQVAELTKRFPVYD

SEQ ID NO: 10249 - DNA, 1242 bp, Candidatus Phytoplasma australiense
  CDS (1)..(1242): transl_table=11
atgaaatcacaattaagtttaaaagatccaaaaatatttgaactaatcgaacaagaaaaaaaaagacaaaaagaaaatatcatattaattgcttccgaaaacttcgtttccaaagaagttttagaaactcaaggtagtattttaactaataaatacgccgaaggatatcctggaaaaagatattatcatggttgtggtaatgtagatgatattgaacaaatagccatcgaaagggcgaaaaaactctttaatgctcgttatgccaacgttcaaccgcattcaggttctcaagctaatatggcagttttacaagctttattgcaacctaacgataaaattttaagtttgtctttaaacgatggtgggcatttaactcacggacataaattaagtttttcaggtaaatattatcaatcttattcttataatgtcgatccaacaacagaaatgcttgattatgaatcaattagaaaactggctttggaaatcaaaccaaaattaattatcgcaggatattctgcttattccagaaaaattaattttcaaaaattccgtgagattgctaatgaagtcaatgcttatttaatggctgatattgctcatattgcaggctttgttgcatgcaaattacacccttgtcctttagaagctcaagcagatatagttacttcaacgactcacaaaactttaagaggacctcgggggggattgattttaaccaacaaagaaaaaataatgcaacaaattaatagatctgtttttccgggaattcaaggagggcctttgatgcatgttattgctgctaaagctgtttccttcaaagaagctcaaagtttagaatttaaaaattatcaacaacaagtaattaaaaacgctcaagcatttgctcaaacttttcaaaaaaaaggttatcacgttgtaagtcaaggaactgataatcatttatttttaattaatttaaaaaaaacaaaccctctttttaccggagaaaaaattgcaaacattttagaaaaagttaacattatagtcaacaaaaacactattccttttgatcaagaaaaaccaatgtttactagtggtattaggttgggaacgcctgccatgacaacaaaaggatttcaagaagcagatttcattaagttggcagatttgattgatcaggccatcaaaaatagggacgacaacgtgtatctgcaaaaaataaaaaaagaagttctagattggacaaatgattttaaataa

SEQ ID NO: 10250 - protein, 413 aa, Candidatus Phytoplasma australiense
MKSQLSLKDPKIFELIEQEKKRQKENIILIASENFVSKEVLETQGSILTNKYAEGYPGKRYYHGCGNVDDIEQIAIERAKKLFNARYANVQPHSGSQANMAVLQALLQPNDKILSLSLNDGGHLTHGHKLSFSGKYYQSYSYNVDPTTEMLDYESIRKLALEIKPKLIIAGYSAYSRKINFQKFREIANEVNAYLMADIAHIAGFVACKLHPCPLEAQADIVTSTTHKTLRGPRGGLILTNKEKIMQQINRSVFPGIQGGPLMHVIAAKAVSFKEAQSLEFKNYQQQVIKNAQAFAQTFQKKGYHVVSQGTDNHLFLINLKKTNPLFTGEKIANILEKVNIIVNKNTIPFDQEKPMFTSGIRLGTPAMTTKGFQEADFIKLADLIDQAIKNRDDNVYLQKIKKEVLDWTNDFK

SEQ ID NO: 10251 - DNA, 1296 bp, Burkholderia ambifaria MC40-6
  CDS (1)..(1296): transl_table=11
atgtactcggccgcaccggtcaacctgtacacacttaacggaaaccgtatgtttgacagagcccaaagcaccatcgcgaacgtcgatcccgaactctttgctgcgatcgagcaggaaaaccgccgccaggaagatcacatcgagctgatcgcgtcggaaaactacacgagcccggccgtgatggccgcccagggctcgcagctcacgaacaagtacgcggaaggttatccgggcaagcgctactacggcggctgtgaatacgtcgacgtggtcgagcagctggcgatcgaccgtgtgaagcagctgttcggcgcggaagccgcgaacgtgcagccgaactcgggttcgcaggcgaaccagggcgtgttcttcgcgatgctcaagccgggcgacacgatcatgggcatgagcctggcgcacggcggtcacctgacgcacggctcgccggtgaacatgtcgggcaagtggttcaacgtggtgagctacggtctgaacgagcaggaagacatcgactacgacgcggccgagcagctcgcgcaggaacacaagccgaagctgatcgtcgcgggcgcgtcggcgttcgcgctgaagatcgacttcgagcgtctggcgaagatcgcgaagtcggtgggtgcgtacctgatggtcgacatggcgcactacgcgggcctgatcgcggcgggcgtgtatccgaacccggtgccgcatgcggacttcgtgacgacgacgacgcacaagagcctgcgcggcccgcgcggtggcgtgatcctgatgaaggccgagtacgagaagccgatcaactcggcgatcttcccgggcatccagggtgggccgctgatgcacgtgatcgcggcgaaggccgtggcgttcaaggaagcgctgtcgccggaattcaaggcgtaccaggaaaaggtggtcgagaacgcgcgcgtgctggctgaaacgctggtcaagcgcgggctgcggatcgtgtcgggccgcaccgaaagccacgtgatgctggtggacctgcgcgcgaagaacatcaccggcaaggctgcggaagcggcgctgggtgctgcacacatcacggtgaacaagaacgcgatcccgaacgatccggaaaagccgttcgtgacgagcggcatccgtctgggttcgccggcgatgacgacgcgcggcttcggcccggcggaagccgaactggtcggcaacctgattgccgacgtgctcgagaacccggaagatgcggcgacgatcgagcgtgtgcgcgcgcaagtggccgagctgaccaagcgtttcccggtctatcgctga

SEQ ID NO: 10252 - protein, 431 aa, Burkholderia ambifaria MC40-6
MYSAAPVNLYTLNGNRMFDRAQSTIANVDPELFAAIEQENRRQEDHIELIASENYTSPAVMAAQGSQLTNKYAEGYPGKRYYGGCEYVDVVEQLAIDRVKQLFGAEAANVQPNSGSQANQGVFFAMLKPGDTIMGMSLAHGGHLTHGSPVNMSGKWFNVVSYGLNEQEDIDYDAAEQLAQEHKPKLIVAGASAFALKIDFERLAKIAKSVGAYLMVDMAHYAGLIAAGVYPNPVPHADFVTTTTHKSLRGPRGGVILMKAEYEKPINSAIFPGIQGGPLMHVIAAKAVAFKEALSPEFKAYQEKVVENARVLAETLVKRGLRIVSGRTESHVMLVDLRAKNITGKAAEAALGAAHITVNKNAIPNDPEKPFVTSGIRLGSPAMTTRGFGPAEAELVGNLIADVLENPEDAATIERVRAQVAELTKRFPVYR

SEQ ID NO: 10253 - DNA, 1248 bp, Burkholderia ambifaria MC40-6
  CDS (1)..(1248): transl_table=11
atgttcaatcgcactaccagcaccgtcgccaacgtcgatcccgaactctggactgccattcaggacgagaaccgccgccaggaagatcacatcgagctgatcgcgtcggaaaactacacgagcccggccgtgatggccgcccagggctcgcagctcacgaacaagtacgcggaaggttatccgggcaagcgctactacggcggctgtgaatacgtcgacgtggtcgagcagctggcgatcgaccgtgtgaagcagctgttcggcgcggaagccgcgaacgtgcagccgaactcgggttcgcaggcgaaccagggcgtgttcttcgcgatgctcaagccgggcgacacgatcatgggcatgagcctggcgcacggcggtcacctgacgcacggctcgccggtgaacatgtcgggcaagtggttcaacgtggtgagctacggtctgaacgagcaggaagacatcgactacgacgcggccgagcagctcgcgcaggaacacaagccgaagctgatcgtcgcgggcgcgtcggcgttcgcgctgaagatcgacttcgagcgtctggcgaagatcgcgaagtcggtgggtgcgtacctgatggtcgacatggcgcactacgcgggcctgatcgcggcgggcgtgtatccgaacccggtgccgcatgcggacttcgtgacgacgacgacgcacaagagcctgcgcggcccgcgcggcggcgtgatcctgatgaaggccgagtacgagaagccgatcaactcggcgatcttcccgggcatccagggtgggccgctgatgcacgtgatcgcggcgaaggccgtggcgttcaaggaagcgctgtcgccggaattcaaggcgtaccaggaaaaggtggtcgagaacgcgcgcgtgctggcagaaacgctggtcaagcgcgggctgcgaatcgtgtcgggccgcaccgaaagccacgtgatgctggtggacctgcgcgcgaagaacatcaccggcaaggcggcggaggcggcgctgggtgctgcgcacatcacggtgaacaagaacgcgatcccgaacgatccggaaaagccgttcgtgacgagcggcatccgtctgggttcgccggcgatgacgacgcgcggcttcggcccggcggaagccgagctggtcggcaacctgattgcggacgtgctggaagcgccggaagatgcggcgacgatcgagcgcgtgcgcgggcgcgtcgcggagttgacgcagcgtttccccgtctacggctga

SEQ ID NO: 10254 - protein, 415 aa, Burkholderia ambifaria MC40-6
MFNRTTSTVANVDPELWTAIQDENRRQEDHIELIASENYTSPAVMAAQGSQLTNKYAEGYPGKRYYGGCEYVDVVEQLAIDRVKQLFGAEAANVQPNSGSQANQGVFFAMLKPGDTIMGMSLAHGGHLTHGSPVNMSGKWFNVVSYGLNEQEDIDYDAAEQLAQEHKPKLIVAGASAFALKIDFERLAKIAKSVGAYLMVDMAHYAGLIAAGVYPNPVPHADFVTTTTHKSLRGPRGGVILMKAEYEKPINSAIFPGIQGGPLMHVIAAKAVAFKEALSPEFKAYQEKVVENARVLAETLVKRGLRIVSGRTESHVMLVDLRAKNITGKAAEAALGAAHITVNKNAIPNDPEKPFVTSGIRLGSPAMTTRGFGPAEAELVGNLIADVLEAPEDAATIERVRGRVAELTQRFPVYG

SEQ ID NO: 10255 - DNA, 1260 bp, Exiguobacterium sibiricum 255-15
  CDS (1)..(1260): transl_table=11
atggaacaaacaccactaacgtatctgaaacagcaagatgaggaactcttttcggctatgcgcaaggaactaaaacgtcaacgcgataacatcgagttgattgcgtcagaaaactttgtctcacaagcggtcatggaagctcaaggcagcgtgctgacgaacaaatacgctgaaggttacccgggtcgtcgttattacggcggttgtgagttcgtcgatttagcggaaaacttggcacgtgatcgtgcgaaggccatctttggagcagaacacgttaatgttcagccgcactcaggtgcccaggccaacatggccgtctacttcacaattctcaatcaaggcgacacggtcctcgggatgaacctctcccatggtggtcacctgacacacggcagtcctgtgaatttctccggtgttcaatacaacttcgtcgagtacggcgtcgatccagaaacagagatgatcgattacgatgtcgtcgcgaagcttgcggaagaacacaaaccaaaactgatcgttgcgggagcatcggcttatccgcgcgtgattgacttcaaacgattccgtgaaatcgcggacagtgtcggtgcctacttgatggtcgacatggcccacatcgcgggactcgttgcagcaggtctgcatccgaacccggtcgaacatgcccacttcgtcacgacgacgacgcacaagacgcttcgtggaccgcgcggtggaatgattctttgtaaagaagagcatgccaaagcgatcgataaatcgatcttcccgggtattcaaggcggaccgcttatgcacgtcatcgcagcgaaagccgttgcctttgcggaagcattagcacctgaattcaaggattacatcgagcaagtcgtagcgaatgcgaaagtcctcggtgaagaattgacggcacgcggactgcggattgtctccggcggtaccgacaaccacttgctgctcgtcgacctgcagccgctcggcatcacaggaaaactggcagagcatgcactggacgaagccggtatcacggtcaacaaaaacacgattccatttgatccggcaagtccgttcgtcacgagtggaatccggatcggaacagcggcgatgacatcacgcggtttcaaagaagcagaaatgaaacaaatcgcggaactgatcgaactcgttctgaaaaatccggaagatcaagaaacactgacaagtgcccataagcaagttctcgctttgacaggccgtttcccgctttacccggaacgcggttaa

SEQ ID NO: 10256 - protein, 419 aa, Exiguobacterium sibiricum 255-15
MEQTPLTYLKQQDEELFSAMRKELKRQRDNIELIASENFVSQAVMEAQGSVLTNKYAEGYPGRRYYGGCEFVDLAENLARDRAKAIFGAEHVNVQPHSGAQANMAVYFTILNQGDTVLGMNLSHGGHLTHGSPVNFSGVQYNFVEYGVDPETEMIDYDVVAKLAEEHKPKLIVAGASAYPRVIDFKRFREIADSVGAYLMVDMAHIAGLVAAGLHPNPVEHAHFVTTTTHKTLRGPRGGMILCKEEHAKAIDKSIFPGIQGGPLMHVIAAKAVAFAEALAPEFKDYIEQVVANAKVLGEELTARGLRIVSGGTDNHLLLVDLQPLGITGKLAEHALDEAGITVNKNTIPFDPASPFVTSGIRIGTAAMTSRGFKEAEMKQIAELIELVLKNPEDQETLTSAHKQVLALTGRFPLYPERG

SEQ ID NO: 10257 - DNA, 1254 bp, Xylella fastidiosa M23
  CDS (1)..(1254): transl_table=11
atgttcccgcgtgatgctcgtcttgatatgtacgatcccgagttggctaaggccatcgctgctgaagtgaggcgtcaggaggatcacgttgagttgattgccagtgaaaattattgcagtacgttggtgatgcaggtgcaggggagtcaactgactaataagtatgctgaagggtattctggaaagcgttactacggtggttgtgagtatgtcgatatcgctgagcaattggcgattgagcgtgccaaaaaactgtttggtgccgattatgccaatgtgcagccccatagcggttcacaagccaatcaagcggtgtactttgccttgttgcagccaggcgatacgatcctcgggatgagcttggcgcatggcggtcacttgactcacggcgccaatgttaatgtgtctggcaagttgttcaatgcggttcagtacggagtgaatgctcaagggttgattgattacgaggctgttgaatcgcttgcgttagagcatcggccgaagatggttgtggcgggcttttcggcgtattcgcagaaaattgattgggcgcgcttccgtgccattgctgatcaggtgggcgcttacttgcttgttgatatggcacatgtggctggcttggtggcggctggtgtctatccgagtccgctgccgcatgcgcatgttgtgacttcgacgacgcataagacactgcgcggcccacgtggcggcattattgttgcgcaggctccgcaggaggcgttggttaagaagttgcagtcgatagtgtttcctgggatccagggtggtccattgatgcatgtgatcgcggccaaagcggttgcttttaaggaggcgttggagcctgcgtttaaggtgtatcagcagcaggtggtgaagaatgcgaaggcgatggctgggaccctcatgttacgcggctataagattgtctctggtggtacagaaaatcatttgatgttggttgacatgatcggtagggatgtctctgggaaggacgctgagggcgcattgggtcaggttcatatcactgtcaataagaatgcggtaccggatgatccgcgctctccgttcgtaacctccgggttacgcttggggactccagcagtcacgacacggggttaccaggagcaggattgtgtggacttagcgcactggattgctgatgtgcttgacgcgcctgcagatgtgacggtcattgccgcagtccgtgagaaggttgcggcgcagtgcaagaagtatcctgtgtatcgctga

SEQ ID NO: 10258 - protein, 417 aa, Xylella fastidiosa M23
MFPRDARLDMYDPELAKAIAAEVRRQEDHVELIASENYCSTLVMQVQGSQLTNKYAEGYSGKRYYGGCEYVDIAEQLAIERAKKLFGADYANVQPHSGSQANQAVYFALLQPGDTILGMSLAHGGHLTHGANVNVSGKLFNAVQYGVNAQGLIDYEAVESLALEHRPKMVVAGFSAYSQKIDWARFRAIADQVGAYLLVDMAHVAGLVAAGVYPSPLPHAHVVTSTTHKTLRGPRGGIIVAQAPQEALVKKLQSIVFPGIQGGPLMHVIAAKAVAFKEALEPAFKVYQQQVVKNAKAMAGTLMLRGYKIVSGGTENHLMLVDMIGRDVSGKDAEGALGQVHITVNKNAVPDDPRSPFVTSGLRLGTPAVTTRGYQEQDCVDLAHWIADVLDAPADVTVIAAVREKVAAQCKKYPVYR

SEQ ID NO: 10259 - DNA, 1248 bp, Burkholderia phymatum STM815
  CDS (1)..(1248): transl_table=11
atgtttgacagagcccaaagcaccatcgccaacgtcgatcccgagatctggaacgccatccaggacgaaaaccgccgtcaggaagagcacatcgaactgatcgcgtcggaaaactacacgagcccggccgtgatggccgcgcagggctcgcagctcaccaacaagtacgccgaaggctacccgggcaagcgctactacggcggctgcgaatacgtcgacgtcgtcgagcagctcgcgatcgaccgcgtgaagcagctgtttggcgctgaagccgcgaacgttcagccgaactcgggctcgcaggccaaccagggcgtgtttttcgcgatgctgaagccgggcgacacgatcatgggcatgagcctcgcgcacggcggccacctgacgcacggctcgcctgtcaacatgtcgggcaagtggtttaacgtggtgagctacggcctgaacgaagccgaagacatcgactacgacgcggccgagaagctcgcacaggaacacaagccgaagatcatcgtcgcgggcgcatcggcgttcgcgctgcgcatcgacttcgagcgtctgtcgaagatcgcgaagtcggtcggcgcgtatctgatggtcgacatggcgcactacgccggcctgattgctgccggcgtctatccgaacccggtaccgttcgccgacttcgtcaccacgaccacgcacaagagcctgcgcggcccgcgcggcggcgtgatcctgatgaaggccgaattcgaaaagcagatcaattcggccatcttcccgggcatccagggcggtccgctgatgcacgtaatcgcgggcaaggccgtcgcgttcaaggaagcgctggcgccggaattcaaggaataccagcagcgcgtggtcgacaatgctcgcgtgctggctgaaacgcttgtcaagcgcggtctgcgcatcgtctcgggacgcaccgaaagccacgtgatgctggtcgacctgcgcgcgaagaagatcacgggcaaggcagcggaagcggcgctcggcgcggcgcacatcacggtcaacaagaacgcgattccgaatgacccggaaaagccgttcgtgacgagcggcatccgtctcggttcgcccgcgatgacgacgcgcggcttcggtacgaaggaagccgagcaggtcggcaacctgattgccgacgtgctggacaaccccgaagacacggcgacgatcgagcgcgtgcgcgcgcaggtcgccgagctgacgcagcgtttcccggtctaccgctaa

SEQ ID NO: 10260 - protein, 415 aa, Burkholderia phymatum STM815
MFDRAQSTIANVDPEIWNAIQDENRRQEEHIELIASENYTSPAVMAAQGSQLTNKYAEGYPGKRYYGGCEYVDVVEQLAIDRVKQLFGAEAANVQPNSGSQANQGVFFAMLKPGDTIMGMSLAHGGHLTHGSPVNMSGKWFNVVSYGLNEAEDIDYDAAEKLAQEHKPKIIVAGASAFALRIDFERLSKIAKSVGAYLMVDMAHYAGLIAAGVYPNPVPFADFVTTTTHKSLRGPRGGVILMKAEFEKQINSAIFPGIQGGPLMHVIAGKAVAFKEALAPEFKEYQQRVVDNARVLAETLVKRGLRIVSGRTESHVMLVDLRAKKITGKAAEAALGAAHITVNKNAIPNDPEKPFVTSGIRLGSPAMTTRGFGTKEAEQVGNLIADVLDNPEDTATIERVRAQVAELTQRFPVYR

SEQ ID NO: 10261 - DNA, 1260 bp, Burkholderia phymatum STM815
  CDS (1)..(1260): transl_table=11
atgttttcaaaagaacagacgatcgcgggcttcgatcccgaactgtcggccgcgatgctgggcgagcgtcaacgacaggaagatcacatcgagctgatcgcgtcggaaaactatgcgagtccgcgcgtgctcgaagcgcagggttccgtgctgaccaacaagtatgcggaagggtatccgggcaagcgctattacggcggatgcgagcatgtggacgtggtcgaatcgctggccatcgagcgggccaggcagctgttcggcgctgggtacgccaacgttcagccgcatagcggatcgcaggcgaacgcggccgtctatctcgcgctgctcgcgcccggcgacgccatgcttggcatgagcctcgcgcacggcggccacctgacgcacggcgcgaaggtgtcattttcgggcaaggtgttcaacgcggttcagtatggcgtcgacgcggcgacgggactgatcgactacgacgacgtcgcgcggctcgcgctcgaacatcgaccgaagatgatcgtggccggcttctcagcgtattcgcgcgtgctcgacttcgcgcgctttcgccagatcgccgacagcgtcggcgcatttctgttcgtcgatatggcgcatgtggccggtctcgttgcggcaggtctctacccgaatccagttccatttgcggacgtcgtgacgacgaccacgcacaagacgctgcgcggtccgcggggcggtctgatcctcgcgcgcgccaacgaagcgatcgaaaagaagctcagcgcgatggtctttccaggcacgcaaggcggcccgctgatgcatgtgatcgcggcgaaagcggtggcgttcaaggaagcgctcggcgcggaattcgtcgcgtaccagaagcagacgctgaacaatgcgcgcgcgatggtgggcgttttcatcgagcacggctacaaggtggtgtcgggcggcacggacgatcacctcttcctcgtggatctcgtcgataaagggatcacgggcaaggacgcggacgcggcgctcggccgcgcgcacatcacggtgaacaagaacgcggtgccgaacgacccgcagtcgccgttcgtgacgagcggcattcggatcggcacgccggccatcacgacgcgcggattcgatgagaacgatgcaaggctgacggcgtcgctcgtctgcgatgtgctcgacagtatcggcgatgagcggacggagacacacgtgcgcgaccaggtcgcgcgactgtgcgcgcgattgcccgtgtacagagggctgtga

SEQ ID NO: 10262 - protein, 419 aa, Burkholderia phymatum STM815
MFSKEQTIAGFDPELSAAMLGERQRQEDHIELIASENYASPRVLEAQGSVLTNKYAEGYPGKRYYGGCEHVDVVESLAIERARQLFGAGYANVQPHSGSQANAAVYLALLAPGDAMLGMSLAHGGHLTHGAKVSFSGKVFNAVQYGVDAATGLIDYDDVARLALEHRPKMIVAGFSAYSRVLDFARFRQIADSVGAFLFVDMAHVAGLVAAGLYPNPVPFADVVTTTTHKTLRGPRGGLILARANEAIEKKLSAMVFPGTQGGPLMHVIAAKAVAFKEALGAEFVAYQKQTLNNARAMVGVFIEHGYKVVSGGTDDHLFLVDLVDKGITGKDADAALGRAHITVNKNAVPNDPQSPFVTSGIRIGTPAITTRGFDENDARLTASLVCDVLDSIGDERTETHVRDQVARLCARLPVYRGL

SEQ ID NO: 10263 - DNA, 1284 bp, Nostoc punctiforme PCC 73102
  CDS (1)..(1284): transl_table=11
atgactaggactaattcagactttctttcctccaccgatccagcgatcgcggagttaatcaacgacgaactacaacgccagcgagatcacttggagttgattgctagcgaaaactttacctctgctgctgtactagctgctcaaggttcagtactgacaaataaatatgccgagggattacctggtaaacgctactatggcggttgtgagtatatcgacaaaattgagcaactagctatcaatcgtgctaaacagatatttggcgctgctcatgcaaatgtgcaaccccattctggcgcacaagccaattttgctgtgtttctgtcgctgctgcaaccaggagacaaaattatggggatggatttgtctcacgggggacatctcacccacggttcacctgtaaatgtctcaggtaagtggtttcaagttagccactacggtgtcagtcaacaaacagaacaacttgactatgaccaaattcgggagctggcgctgagggagcgtcctaagctcttgatttgtggttattcggcttatccccggataattgattttgaaaaattccgtagtattgctgatgaagtcggtgcttacttacttgccgatattgctcatatcgctggtttagttgctagtggtcttcatcccgaccccattcctcattgtcatgtagtaacaacaactacacataagactctacgcggccctagaggtggtttaatcttgaccagcgatgcagaactaggtaaaaagctagataaatctgtttttcctggtactcagggcgggccattggaacacgtcattgctggtaaggcagtggcttttggagaagccctaaagcctgagtttaaaacttattctgctcaagtaattgaaaatgctcgtgctttggcagaacaactacaaaatcggggtttaaaattagtgtcaaatggcactgacaaccatttactactcgtggatttacgttctgtaaatctaactggtaagcaagcggatcagctagtcagcactgtgaatataactgctaacaagaatactattcccttcgatccacaatcgccatttgttactagtggtctgaggttaggttcgccagcaatgaccacacggggcttaggagtagcagaatttaccgagattgcaaatattattagcgatcgcctgctttctccagattccgacgtagtaacccaagattgtcggcaaagggtagcagcattgtgcgatcgcttccccttatatcctcacctggaaattcctgtaccagcactagcataa

SEQ ID NO: 10264 - protein, 427 aa, Nostoc punctiforme PCC 73102
MTRTNSDFLSSTDPAIAELINDELQRQRDHLELIASENFTSAAVLAAQGSVLTNKYAEGLPGKRYYGGCEYIDKIEQLAINRAKQIFGAAHANVQPHSGAQANFAVFLSLLQPGDKIMGMDLSHGGHLTHGSPVNVSGKWFQVSHYGVSQQTEQLDYDQIRELALRERPKLLICGYSAYPRIIDFEKFRSIADEVGAYLLADIAHIAGLVASGLHPDPIPHCHVVTTTTHKTLRGPRGGLILTSDAELGKKLDKSVFPGTQGGPLEHVIAGKAVAFGEALKPEFKTYSAQVIENARALAEQLQNRGLKLVSNGTDNHLLLVDLRSVNLTGKQADQLVSTVNITANKNTIPFDPQSPFVTSGLRLGSPAMTTRGLGVAEFTEIANIISDRLLSPDSDVVTQDCRQRVAALCDRFPLYPHLEIPVPALA

SEQ ID NO: 10265 - DNA, 1248 bp, Elusimicrobium minutum Pei191
  CDS (1)..(1248): transl_table=11
atgtattcaaatttgcagaaaacagacaaggcagtttttgacgcggttgaaaaggaactaggccgccagcgcactaagcttgaattaatagcaagtgaaaactttacatctttaagcgttatggaagcgcaggggagtattcttacaaacaaatacgccgaaggctacccgggtaaacgttattacggcggctgcgaatttgtagacatggttgaaactttagcgatagaaagagctaaacaaattttcggcgcggagcacgccaatgtgcagccgcattcgggcgcgcaggcaaatatggccgcttatttggctcttattaatccaggtgacaccgtgcttggcttgaatctttcccacggcgggcatttaactcacgggcatccgatgaacttttcaggcaaatattttaaaatcgttcccatgaatgtacgtaaagaggatgagcaaattgattatgaggaagccgccaaactggcccttgaacacaaacccaaagttattatggcgggcgcttcaaattattcaagaatttttgattggaaaaaactgcgcgaaatcgcggacagtgtggacgcataccttatttgtgacgtggcgcattacgcagggcttatagccgcgggcgtttattcaaaccccgtgccttacgcggacattgttacaacaacaacacataaaaccctgcgcggccccagaggcggtttaattttatgtaaagaaaaacatgccaaagcggttaactcatcagtttttcccggccagcagggcgggccgctaatgcatgttatcgcggccaaagcggtttgcttcggcgaagcgttaaaaccggaatttaaagaataccaaacccaagttgttaaaaacgccaaagaactttcgacccaattacaaaaactggggtaccgcatagtttccggcggtacggattgccatgttttatgtgttgatttaacttctaaatcaatgactggtaaagctgctgaggaagctttagataaagcgggcataaccacaaataaaaataccattccttacgatacgcaaaaaccgtttattacaagcggtgtaaggcttggcactcccgctgttacaacaaggggcatgaaagaagctgaaatggcggctatagcctcctttattgacaatgttttaaataacgcggataatgaagctaaacttgcggaaatttctaaagaggttacagcttttttaggtaaattcctgttatatacagaattaaactaa

SEQ ID NO: 10266 - protein, 415 aa, Elusimicrobium minutum Pei191
MYSNLQKTDKAVFDAVEKELGRQRTKLELIASENFTSLSVMEAQGSILTNKYAEGYPGKRYYGGCEFVDMVETLAIERAKQIFGAEHANVQPHSGAQANMAAYLALINPGDTVLGLNLSHGGHLTHGHPMNFSGKYFKIVPMNVRKEDEQIDYEEAAKLALEHKPKVIMAGASNYSRIFDWKKLREIADSVDAYLICDVAHYAGLIAAGVYSNPVPYADIVTTTTHKTLRGPRGGLILCKEKHAKAVNSSVFPGQQGGPLMHVIAAKAVCFGEALKPEFKEYQTQVVKNAKELSTQLQKLGYRIVSGGTDCHVLCVDLTSKSMTGKAAEEALDKAGITTNKNTIPYDTQKPFITSGVRLGTPAVTTRGMKEAEMAAIASFIDNVLNNADNEAKLAEISKEVTAFLGKFLLYTELN

SEQ ID NO: 10267 - DNA, 1254 bp, Borrelia hermsii DAH
  CDS (1)..(1254): transl_table=11
atgatagatagcattttatttgatttaattgaaagggaagttaagagggagaaagaaaatattgaattaattgcttcagaaaattttgtctcatcagatgtaagaagggctgttggaagtattttgactaataaatatgctgagggttatccttcaaagagatattatggtggatgctttgttgttgatgatattgaaagtttggctatatcacgggcaagagagctttttggtgcaaattatgccaatgtccaacctcatagtggttctcaagctaatatggctgctataatggcacttattaagcctggggatagaattcttggaatggaattgtctcatggtggtcatttaacccatggtagtaaagttagtttttctgggatgttctttgacgcatattcttatggagtgtcaagggaatctgagatgattgattatgatgatgttagaaaaatagctaaagaatgtagacccaatttaataattgctggtgcttcttcttattcaagggaaattgattttaaaaaatttcgtgagatagcggatgaagtttcagcttatcttttgtgtgatgttgcccatacagcaggtcttattgctacaggttttcataattctcctattgatgttgcacatttaactacaagtactacccataagactttaagggggcctagaggaggattaattcttgcaggtagggaatctagtataatagtaaattataataataaagagagaagactggaggatgctgttaattcttgtgtttttccaggaacccagggtggacccttaatgcatgttattgcaggtaaagcagtggcttttagagaagctttgatggaggattttaaggattatatttctagggtcataagtaataccaaagctatggctgagtgttttatttcagaaggttttaggatagttagtggtggaacggataatcatttgtttttagttgaccttggtattttgggtattacgggagctgatgctgagaaggttcttgaaagagtaaacattactcttaataagaacgcaattccttttgattcaaagaatccttctgtaacttctggtattcgaattggtgctgctgctattacttcaagaggtttaaatagagatgattctattagagttgctcattttgttattagggctttaaagactaaatccgaagatgagcttaaaaaaataaaacgagacgtcatagaatttattagcagttttgatatgccttaa

SEQ ID NO: 10268 - protein, 417 aa, Borrelia hermsii DAH
MIDSILFDLIEREVKREKENIELIASENFVSSDVRRAVGSILTNKYAEGYPSKRYYGGCFVVDDIESLAISRARELFGANYANVQPHSGSQANMAAIMALIKPGDRILGMELSHGGHLTHGSKVSFSGMFFDAYSYGVSRESEMIDYDDVRKIAKECRPNLIIAGASSYSREIDFKKFREIADEVSAYLLCDVAHTAGLIATGFHNSPIDVAHLTTSTTHKTLRGPRGGLILAGRESSIIVNYNNKERRLEDAVNSCVFPGTQGGPLMHVIAGKAVAFREALMEDFKDYISRVISNTKAMAECFISEGFRIVSGGTDNHLFLVDLGILGITGADAEKVLERVNITLNKNAIPFDSKNPSVTSGIRIGAAAITSRGLNRDDSIRVAHFVIRALKTKSEDELKKIKRDVIEFISSFDMP

SEQ ID NO: 10269 - DNA, 1248 bp, Ralstonia pickettii 12J
  CDS (1)..(1248): transl_table=11
atgttcgaacgcagccgctatacgatcgaccagatcgatcccgaaatctttgccgccatccagaaggaaaatcagcgtcaggaagaccacatcgagctgattgcctctgagaactacacctccccggccgtgatggccgcgcagggctcgcaactgaccaacaagtacgccgagggctaccccggcaagcgttactacggcggttgcgaatacgtggacgtggtggaacagctcgccatcgatcgcgtgaagcagctctttggggccgaagctgccaacgtgcagccgaactcgggctcgcaggccaaccagggcgtgttcttcgccgtgctcaagccgggcgacacgatcatggggatgagcctggccgaaggcggccacctgacccacggcatggcgctcaacatgagcggcaagtggttcaacgttgtcagctacggcctgaacgctcaggaagacatcgactacgacgcgctcgaagccctggcgcaagagaagaagccgaagctgatcattgccggcgcatcggcatttgcgctgcgcatcgatttcgaacgcatcggcaagatcgccaagtcgattggtgcgtacttcatggtggacatggcccactacgcgggcctgatcgctgccggtgtgtacccgaacccggtgccgcacgccgacttcgtcacgacgaccacgcacaagagcctgcgcggcccgcgcggcggcgtgatcctgatgaaggccgaacacgagaaggccatcaactcggcgatcttcccgggcatccagggcggcccgctgatgcacgtgattgccggcaaggcggtggcgttcaaggaagcactgtcgcccgagttcaaggcttaccaggaacaggtggtgaagaacgctgcagccatggccgaaacgctgatggcccgcggcctgcgtatcgtctccggccgcaccgaaagccacgtgatgctggtcgacctgcgcgccaagaagatcaccggcaaggaagccgaaaaggtgctgggtgatgcacacatcacggtcaacaagaacgccattccgaatgacccggaaaagccgttcgtgacctcgggcgtgcgcctgggctcgcctgccatgaccacgcgtggcttcaaggaagccgaggccgtgaaggtcgcccacctgattgccgatgtgctggacaacccgcacgacgaggccaacatcgccgccgtgcgcgccaaggtggctgagctgaccaagcagttcccggtctacggctga

SEQ ID NO: 10270 - protein, 415 aa, Ralstonia pickettii 12J
MFERSRYTIDQIDPEIFAAIQKENQRQEDHIELIASENYTSPAVMAAQGSQLTNKYAEGYPGKRYYGGCEYVDVVEQLAIDRVKQLFGAEAANVQPNSGSQANQGVFFAVLKPGDTIMGMSLAEGGHLTHGMALNMSGKWFNVVSYGLNAQEDIDYDALEALAQEKKPKLIIAGASAFALRIDFERIGKIAKSIGAYFMVDMAHYAGLIAAGVYPNPVPHADFVTTTTHKSLRGPRGGVILMKAEHEKAINSAIFPGIQGGPLMHVIAGKAVAFKEALSPEFKAYQEQVVKNAAAMAETLMARGLRIVSGRTESHVMLVDLRAKKITGKEAEKVLGDAHITVNKNAIPNDPEKPFVTSGVRLGSPAMTTRGFKEAEAVKVAHLIADVLDNPHDEANIAAVRAKVAELTKQFPVYG

SEQ ID NO: 10271 - DNA, 1254 bp, Erwinia tasmaniensis Et1/99
  CDS (1)..(1254): transl_table=11
atgttaaagcgtgatatgaacattgccgattacgatgccgatttgtggcaggcgatggagcaagagaaagtgcgtcaggaagagcatattgagctgattgcctcagaaaactataccagccctcgtgtcatgcaggctcagggatctcagctgaccaacaaatatgctgaaggctatccgggcaagcgctactacggcggctgcgaacatgtggatatcgttgagcaactggctatcgagcgcgctaaagagctgtttggtgctgactatgccaacgtgcagccgcattctggctcccaggctaacttcgccgtttacacggcgctgctacagccgggtgataccattctgggcatgaacctggctcacggtggccacctgacccacggctctccggttaacctgtccggtaagctatataacgtcatcccttacggtatcgacgaaaccggtaaaattgattacaacgagctggccgaactggctaaagagcatcagccaaaaatgatcgtgggcggtttctctgcctattccggcatatgtgactgggaaaaaatgcgtgaaatcgccgacagcatcggggcttacctgtttgttgatatggcacacgttgcaggtctggttgctgcggacgtgtatccgaaccccgtaccgcatgcccatatcgtcaccaccacaacccataaaacgctggcagggccacgcggcggtctgatcctggcgaaaggcggtgatgaggacctgtacaaaaagctgaattcaggcgtcttccctggcagccagggcggcccgctgatgcacgttatcgcgggtaaagcggtggcgttcaaagaagcgatggagcctgagtttaaaacctatcagcagcaggttgcgaaaaacgccaaagcgatggtggaagtgttccttgctcgcggttacaacgttgtatccggcggtacgcacaaccatcttttcctgctggatttggtagacaaaaatctcaccggtaaagaagcggatgcggccctgggccgagccaacattaccgtgaacaaaaacagcgtgcctaacgatccgaagagtccgtttgtgacttccggtatccgcatcggttcgccagcggtgacgcgtcgcggctttaaagaagctgaagtgcgcgagctggccggctggatcagcgatattcttgataatatcactgacgaaggcgtgagcgagcgcgtgaagaagcaggtgctggatatctgcgcccgtttcccggtctacgcataa

SEQ ID NO: 10272 - protein, 417 aa, Erwinia tasmaniensis Et1/99
MLKRDMNIADYDADLWQAMEQEKVRQEEHIELIASENYTSPRVMQAQGSQLTNKYAEGYPGKRYYGGCEHVDIVEQLAIERAKELFGADYANVQPHSGSQANFAVYTALLQPGDTILGMNLAHGGHLTHGSPVNLSGKLYNVIPYGIDETGKIDYNELAELAKEHQPKMIVGGFSAYSGICDWEKMREIADSIGAYLFVDMAHVAGLVAADVYPNPVPHAHIVTTTTHKTLAGPRGGLILAKGGDEDLYKKLNSGVFPGSQGGPLMHVIAGKAVAFKEAMEPEFKTYQQQVAKNAKAMVEVFLARGYNVVSGGTHNHLFLLDLVDKNLTGKEADAALGRANITVNKNSVPNDPKSPFVTSGIRIGSPAVTRRGFKEAEVRELAGWISDILDNITDEGVSERVKKQVLDICARFPVYA

SEQ ID NO: 10273 - DNA, 1239 bp, Natranaerobius thermophilus JW/NM-WN-LF
  CDS (1)..(1239): transl_table=11
atggaaaacgttaaaaagacagatccaactattttttcttggattgaagaagaatggaaaagacaggaggaaggtattgaattaatagcttctgaaaactttgcctctcgggcagtgatggaagctcaaggtagtgtcctaacgaataaatatgcagaaggatatcccggaaggagatattatggcggatgtcaatttgttgataaagtagaagaactggctatcagtagagttaaagagctatttaatgccgatcatgccaatgtccagccccattcaggagcctcagcaaatatgggggtttatctggcagcattgaagcccggtgatactgtcttgggtatgagcttagatcatggtggacatttaacccacggaagtccggtcaatatatctggtaaatatttcaattttcatcattatggtattttagaggatacaggtaaaattgattttgacaaagtccgggagttggcaaaagaacataaacctaaaatgatagtagctggcgctagtgcttatccacgcattattgattttgctacttttcgcgaaatcgctgatgaggtaggggcttatctaatggtagatatggctcacattgcagggcttgtggcagcggggctacacccaaacccagtcccttatgctgactttgtgaccacaactactcacaaaactttaaggggtccacgtggtggagtggttctatgtaaagaagagtacaaaaaagaaattgacaaagccatgtttccaggtctacagggaggacctctaatgcatgttattgcttccaaggccgtcagctttcaggaagctttaagttctgaatttaaaaattatcaaaaacaagtaataaaaaatgctagcgttttggctgatgaacttaataatttaggatacgatttggtagcaggaggctctgataatcatctaatgctagttgatcttcagaaaaaaggtgtaactggtaaaaaagctgaacgagttctggatgatgttcatatcactgtcaataaaaatgccgtacctaatgatccagaaggtccttttgtaacaagtggattgagactggggacacctgctgttactaccagaggttttgcagaagatgaaatcaaagaagttgctcagttgctcgataaagtaattaccggattagaagatcaggaaaatctagaaaaatgtaaaaaacaggtaaccgacttatgtcatagattccccttgtatcgtcaataa

SEQ ID NO: 10274 - protein, 412 aa, Natranaerobius thermophilus JW/NM-WN-LF
MENVKKTDPTIFSWIEEEWKRQEEGIELIASENFASRAVMEAQGSVLTNKYAEGYPGRRYYGGCQFVDKVEELAISRVKELFNADHANVQPHSGASANMGVYLAALKPGDTVLGMSLDHGGHLTHGSPVNISGKYFNFHHYGILEDTGKIDFDKVRELAKEHKPKMIVAGASAYPRIIDFATFREIADEVGAYLMVDMAHIAGLVAAGLHPNPVPYADFVTTTTHKTLRGPRGGVVLCKEEYKKEIDKAMFPGLQGGPLMHVIASKAVSFQEALSSEFKNYQKQVIKNASVLADELNNLGYDLVAGGSDNHLMLVDLQKKGVTGKKAERVLDDVHITVNKNAVPNDPEGPFVTSGLRLGTPAVTTRGFAEDEIKEVAQLLDKVITGLEDQENLEKCKKQVTDLCHRFPLYRQ

SEQ ID NO: 10275 - DNA, 1248 bp, Geobacter lovleyi SZ
  CDS (1)..(1248): transl_table=11
atgtcaattctctcccagtttgatccagcagttgctgaagcaattcagcatgaaaccgagcgccaggagtataacctggagctgatcgcctctgaaaactttgtgtccgaagccgtgcttgaggctcagggcagtgtcatgaccaacaagtacgccgagggatatccgggcaagcgctactatggcgggtgccaccatgtggatgtggttgaaaacctggctattgagcgggccaaagagctgttcggcgcagaacatgccaatgtgcagccccacgccggttcccaggccaacatggcagtctacaatgcggtctgtcaaccgggtgatactattctgggaatgaacctttcccatggtggccacctgacccacggcagcccggtcaacttctcgggacgcttctataatgtggtgccctacggtgtttctcccgatacagaaaccattgattacaatgaggttgagcgtctggcacttgagcacaagcccaagatgattgtcgttggcgccagtgcctatccccgcatcattgacttcccggccttccgtgccattgctgacaaggttggtgccaaggtgatggttgatatggctcacattgccggcctggtggctgccggcgtacaccccaacccggttccctatgctgaatttgttaccaccactacccacaaaaccctgcgcggccctcgtggcggtatgattctctgccgtgaggagtatgccaagaccattaactcgcaaattttccccggtattcagggtgggccgttgatgcatgtgattgccgccaaggcagtggcctttaaagaggcgctgcaacctgagttcaagacctatcagcagcagatcgtcaagaacgctgccaagctggcagaatgcctgatggcaaaagggtttaagctgacttccggtggtacagacaaccatctgatgctgatcaacttcaccggcacagaaattaccggcaaggctgctgaagaggcactggacaaggccggcattacggtcaataagaacacagtgccgtttgagacccgctctccttttgttacctccggtatccgggttggtacgccggcctgtacctcccatggcctaaaagagaccgagatggagcaggtagccggatttattgctgatgctgtagccaatatcggtaatgatgaggctctggccgctatccagaaacgggtgaatgagctgatgaaaaaatttccactctatgccagccgcctgaaatag

SEQ ID NO: 10276 - protein, 415 aa, Geobacter lovleyi SZ
MSILSQFDPAVAEAIQHETERQEYNLELIASENFVSEAVLEAQGSVMTNKYAEGYPGKRYYGGCHHVDVVENLAIERAKELFGAEHANVQPHAGSQANMAVYNAVCQPGDTILGMNLSHGGHLTHGSPVNFSGRFYNVVPYGVSPDTETIDYNEVERLALEHKPKMIVVGASAYPRIIDFPAFRAIADKVGAKVMVDMAHIAGLVAAGVHPNPVPYAEFVTTTTHKTLRGPRGGMILCREEYAKTINSQIFPGIQGGPLMHVIAAKAVAFKEALQPEFKTYQQQIVKNAAKLAECLMAKGFKLTSGGTDNHLMLINFTGTEITGKAAEEALDKAGITVNKNTVPFETRSPFVTSGIRVGTPACTSHGLKETEMEQVAGFIADAVANIGNDEALAAIQKRVNELMKKFPLYASRLK

SEQ ID NO: 10277 - DNA, 1251 bp, uncultured Termite group 1 bacterium phylotype Rs-D17
  CDS (1)..(1251): transl_table=11
atggaaaacataaaaaaaaatgatattgaaattcatgatatgctggtaaaagaacttaagagacagagggaaaccatagaacttatagcttccgaaaatatagcttcacagtcggttatggaagctcagggttcttgtcttacaaataaatatgctgaagggtatccgggtaaaaggtattatggcggatgcgaagttgttgatatagcggaaactattgcgatagaacgggcaaaaaaactttttaatgcaagatttgcaaatgtacagccacattccggcgctcaggcaaattttgctatattacttgcccttttaaaacccggcgatactattatgggtcttagtttatcacacggtggacatttgacgcacggcagtccttttaacgtttcaggcaaatggtttaatgttatttcttattcggtgagcgaaaaaacaggctgtatagattataatgaaatagagagccttgtgcttgaacataagccaaaacttataatcagcggtgcaagtgcatattcaagaatctgggattgggaaagaataagcggaattgcaaaaaaagttagtgcttatcacatgtcggatatggctcattatgcgggtttggttgctgcgggtatctatccgtcgcctgtaggatatgccgatattactacgactaccactcataaaacacttcgcggacctcgcggcggtttaattcttactaacaatgaagagctagcaaaaaaaattaattccgcaattttccccggagaacagggcggacctttaatgcatgtcatagctgcaaaagccgtggctttcggtgaagctcttaaacctgaatttaaagaatatcaaaagcaggttttagccaatgcaaaacagcttgctgaaactttggaagagggaaaattgaaaattgtttccggcggcactgattctcacatgtttttggttgatttgagacctttgaacgttaagggtaaaaatgcgcaggatactttggaaaaagcagggataactttaaataaaaacggaataccttatgaccttgaaaaaccgacgatgacgtcaggaataagaatcggttcgccggctgtaactacaagaggtatgaaagagcctgaaatggtaaaaatagcagaagctataattaaagttctcaaaaatattgataatgagaaaataatttctgaagtcagtactgatatgttgaaactttgtcaggaatttcctatatacagagggttggaatattag

SEQ ID NO: 10278 - protein, 416 aa, uncultured Termite group 1 bacterium phylotype Rs-D17
MENIKKNDIEIHDMLVKELKRQRETIELIASENIASQSVMEAQGSCLTNKYAEGYPGKRYYGGCEVVDIAETIAIERAKKLFNARFANVQPHSGAQANFAILLALLKPGDTIMGLSLSHGGHLTHGSPFNVSGKWFNVISYSVSEKTGCIDYNEIESLVLEHKPKLIISGASAYSRIWDWERISGIAKKVSAYHMSDMAHYAGLVAAGIYPSPVGYADITTTTTHKTLRGPRGGLILTNNEELAKKINSAIFPGEQGGPLMHVIAAKAVAFGEALKPEFKEYQKQVLANAKQLAETLEEGKLKIVSGGTDSHMFLVDLRPLNVKGKNAQDTLEKAGITLNKNGIPYDLEKPTMTSGIRIGSPAVTTRGMKEPEMVKIAEAIIKVLKNIDNEKIISEVSTDMLKLCQEFPIYRGLEY

SEQ ID NO: 10279 - DNA, 1254 bp, Stenotrophomonas maltophilia K279a
  CDS (1)..(1254): transl_table=11
atgttcccgcgtgacgtccgcatcgaatcctacgatcccgaactggccaaggccatcgccgctgaaacccagcgccaggaagaccacgtcgagctgatcgccagcgagaactacaccagcccggcggtgatggaagcccagggcagccagctgaccaacaagtacgccgaaggctacccgggcaagcgctactacggtggctgcgaatacgtggacatcgccgagcagctggcgatcgaccgcctgaagcagctgttcggcgccgactacgcgaacgtgcagccgcacagcggttcgcaggccaaccaggccgtgtacttcgccctgctgcagccgggtgacaccatcctcggcatgagcctggcccacggcggccacctcacccacggcgccaaggtgaacgcctcgggcaagctgttcaacgccgtgcagtacggcgtcaacgatcagggcctgatcgattacgacgaagtcgagcgcctggccctggagcacaagccgaagatggtcgtggccggcttctcggcctactcgcaggtgatcgactgggcgcgcttccgcgccatcgccgacaaggtcggtgcctacctgttcgtcgacatggcccacgttgccggtctggtggctgcaggcgtctacccgagcccgctggaacacgcccacgtggtcacctccaccacccacaagaccctgcgcggcccgcgtggcggcatcatcgtcgccaagggcgccgacgaagacctggtcaagaagctgcagtcgatcgtgttcccgggcatccagggcggtccgctgatgcacgtcatcgccggcaaggccgtggccttcaaggaagcgctggaaccgggcttcaaggcctaccagcagcaggtggtgaagaacgcccaggcgatggccaatacgctgatcgagcgtggctacaagatcgtttccggcggcacccagaaccacctgatgctggtcgacatgatcggcaaggacgtgtccggcaaggacgcggaagcggcgctgggcaaggcccacatcaccgtcaacaagaactcggtgccgaacgacccgcgttcgccgttcgtgacctcgggcctgcgcctgggcaccccggcggtgaccacccgtggctacgtcgaacaggactgcgtggacctggccaactggatcgccgacgtgctcgacgcgccgaacgatgacgccgtcattgcccgcgtgcgcgatgccgtcagcgcgcagtgccgcaagtacccggtctacggctga

SEQ ID NO: 10280 - protein, 417 aa, Stenotrophomonas maltophilia K279a
MFPRDVRIESYDPELAKAIAAETQRQEDHVELIASENYTSPAVMEAQGSQLTNKYAEGYPGKRYYGGCEYVDIAEQLAIDRLKQLFGADYANVQPHSGSQANQAVYFALLQPGDTILGMSLAHGGHLTHGAKVNASGKLFNAVQYGVNDQGLIDYDEVERLALEHKPKMVVAGFSAYSQVIDWARFRAIADKVGAYLFVDMAHVAGLVAAGVYPSPLEHAHVVTSTTHKTLRGPRGGIIVAKGADEDLVKKLQSIVFPGIQGGPLMHVIAGKAVAFKEALEPGFKAYQQQVVKNAQAMANTLIERGYKIVSGGTQNHLMLVDMIGKDVSGKDAEAALGKAHITVNKNSVPNDPRSPFVTSGLRLGTPAVTTRGYVEQDCVDLANWIADVLDAPNDDAVIARVRDAVSAQCRKYPVYG

SEQ ID NO: 10281 - DNA, 1266 bp, Cellvibrio japonicus Ueda107
  CDS (1)..(1266): transl_table=11
atgtttgataaaacccaaacgattgctgcttttgatccggaaatctgggcgtccatccaaaatgaaggtcgtcgccaggaagagcatatcgagctgatcgcctcggaaaactacaccagccccctggtgatggctgcccaaggtaccaagctgaccaacaagtacgccgagggctatccaggtaagcgctactatggcggttgtgagtatgtagaccaatctgaagccctggccatcgagcgtgccaagcagctgttcggcgccgattatgccaacgtgcagcctcactcaggctcccaggccaacacagcggtttatgcagcactctgcgccccgggtgataccgtactgggtatgagcctggcccacggcggtcacctgacccacggcgccaaggtgaacttctccggcaagatctacaacgcggtgcagtacggcctgaacccggaaaccggtttggtggattatgacgaggttgaacgcctggcccttgagcacaagccaaagatgatcgtggcgggtttctctgcttactcacaagtattggattggcagcgcttccgcgatattgctgacaaagtaggtgcctacttgatggtggatatggcccacgtggcgggtttggttgcggctggcctgtaccccaatccggtacaaattgcggatgtcactacttctaccacccacaaaaccctgcgcggcccccgcggcggtatcatcctggcaaaagccaatgaagagattgagaaaaagctcaactccgccgtgttccccggtggccagggcggcccgttgatgcacgtgattgccgccaaggcgatcagctttaaggaggccatgacgcccgagtacaaagattaccaacagcaagtggtaaagaatgccaaggcaatggctgcgacctttattgagcgcggtatcaaaattgtttctggcggcaccgagaaccacctgatgctggttgacctgattggcaagccatacagcggtaaagatgcagatgaagccctgggtaaagcgcacatcactgttaacaagaatgctgtacccaatgatccgcgttcgcccttcgtgacctctggtattcgtgttggtactccggcaattactacccgtggttttaaagaggcggaatgtatccagttaactaactggatttgcgatattttcgctgccctggaagctggtaatgccgatgcagtcattgagcaggttaaaaccagggtggctagcctttgcaaggagttcccggtatacgcggattaa

SEQ ID NO: 10282 - protein, 421 aa, Cellvibrio japonicus Ueda107
MFDKTQTIAAFDPEIWASIQNEGRRQEEHIELIASENYTSPLVMAAQGTKLTNKYAEGYPGKRYYGGCEYVDQSEALAIERAKQLFGADYANVQPHSGSQANTAVYAALCAPGDTVLGMSLAHGGHLTHGAKVNFSGKIYNAVQYGLNPETGLVDYDEVERLALEHKPKMIVAGFSAYSQVLDWQRFRDIADKVGAYLMVDMAHVAGLVAAGLYPNPVQIADVTTSTTHKTLRGPRGGIILAKANEEIEKKLNSAVFPGGQGGPLMHVIAAKAISFKEAMTPEYKDYQQQVVKNAKAMAATFIERGIKIVSGGTENHLMLVDLIGKPYSGKDADEALGKAHITVNKNAVPNDPRSPFVTSGIRVGTPAITTRGFKEAECIQLTNWICDIFAALEAGNADAVIEQVKTRVASLCKEFPVYAD

SEQ ID NO: 10283 - DNA, 1323 bp, Chloroherpeton thalassium ATCC 35110
  CDS (1)..(1323): transl_table=11
atgcacttggatattttgaaaaatgccgacccggaagtttatgcagccattcaatctgagcttgaacggcaaaccgacacgttggaactcattgcttcggaaaacttcaccagccgcgccgtcatggaagcgtgtggctcggtgatgaccaataaatatgcggaaggctatccaggaaagcgtttttatggcggatgtgaatttgtggatgtagctgaagatcttgcacgcgatagagccaaaaaattgtttagctgtgaatatgcaaatgtgcagccacactcaggatcaagtgccaatatggctgtgatttttaccttctgcaaacctggcgacactattcttggttttgacctctcgcatggcggccacttaacgcatggtagtccggtcaacttttccggccagttttacaacgcacacttttacggcgtggaaaaagaaaccggtcgcatcgacatgaaccgtgttgaggaaaaggccaaagaagttaaaccgaaattaattatctgcggtgcaagcgcttattctcgtgattgggagtatgccgaattccgccgcattgccgatagcgttgacgcaattttgatggccgacatcgctcatccagctggactgattgcaacaggccttctgaacgacccgatgccgcactgtcatgtcgtaactaccacgactcacaaaacccttcgcggaccgcgtggcggcatgattctcatgggcaaagattttgaaaacccgatgggcatcaaagctaaaacgaaaactggcgaacgcatcaaaatggtttccgagttgctcgatgccatggtgatgccgggcattcaaggtggaccgctcatgcacgtaatcgccggaaaagcggttgcgttcggtgaagccttgaaccctgagtataagcaatacatggagcaggttcgcaaaaacgctgcagcaatggctgagcagtttatttcgcttggttatgatattattagcggtggaacagacaaccacttgatgttgatcgacctcagaaataaagatattactggtaaaaaaacggaaaacttgcttcatgaagcgggtatcacggtcaataaaaacatggtgccgtttgatgacaagtcgccgtttgtaaccagcggttttcgtgttggcgctgcggccatgacgaccagagaaatgaaagaagccgaagcgaaaaccatcgtcaaatttatcgataaagtcatctcaaatgcaggttcggaaaatatttctgcgatttgtcaggaagtcaaagaagaggtgaacgccttatgccagcagttccctttatatgatttcgttccagcatcttaa

SEQ ID NO: 10284 - protein, 440 aa, Chloroherpeton thalassium ATCC 35110
MHLDILKNADPEVYAAIQSELERQTDTLELIASENFTSRAVMEACGSVMTNKYAEGYPGKRFYGGCEFVDVAEDLARDRAKKLFSCEYANVQPHSGSSANMAVIFTFCKPGDTILGFDLSHGGHLTHGSPVNFSGQFYNAHFYGVEKETGRIDMNRVEEKAKEVKPKLIICGASAYSRDWEYAEFRRIADSVDAILMADIAHPAGLIATGLLNDPMPHCHVVTTTTHKTLRGPRGGMILMGKDFENPMGIKAKTKTGERIKMVSELLDAMVMPGIQGGPLMHVIAGKAVAFGEALNPEYKQYMEQVRKNAAAMAEQFISLGYDIISGGTDNHLMLIDLRNKDITGKKTENLLHEAGITVNKNMVPFDDKSPFVTSGFRVGAAAMTTREMKEAEAKTIVKFIDKVISNAGSENISAICQEVKEEVNALCQQFPLYDFVPAS

SEQ ID NO: 10285 - DNA, 1323 bp, Chlorobaculum parvum NCIB 8327
  CDS (1)..(1323): transl_table=11
atggactacgaacttctcaagcggctcgaccccgaggtcttcgaggcgattgccaatgaaaccagacgccagactgaaaccctggagctgatcgcttcggaaaacttcaccagcacggcggtcatggaagcctgcggttcggtcatgaccaataaatatgccgagggctaccccggcaagcgctactatggtggctgcgaatttgtcgatgtcgctgagaacctcgcccgcgaccgcgccaagaagcttttcggctgtgagtacgtcaacgtgcagccgcactccggctccagcgccaacatggcggtgctcttcgctgtgctcaagccgggcgactccatcatggggctcgacctctcccacggcggccaccttacccatggcagcaaggtgaacttctccggccagttcttcgacgcccactcctacggtgtcgacaaggaaaccggcattatcgacatgaacgcggtcgaagagatggcattaaaggtcaaaccgaagctcatcatcaccggcgcgagcgcctattctcagggcttcgacttcaaggcgttccgcgaaatcgccgacaaggttggtgcgttccttatggccgacatcgcgcatccggcaggcctcgttgccgctggactttcggccaacccggttccgcactgccacttcgtgaccaccaccacccacaaaaccctgcgcggcccgcgcggcggcatgattatgatgggcaaggatttcgagaatccgatgggcattacggttaacaccaagaatggcccgcgtgtgaagatgatgtccgaggtgatcgacgccgaggtgatgcctggcattcagggcggtccgctcatgcacatcatcgccggcaaggcggttgccttcggcgaagcgctccagcccgagttcaaagcctatgcgcagcagatcaaggacaacgccgccgcgatggctgccaagttcctcgctgccgactaccacatcgtcagcggcggtacgaagaaccacctcatgctgcttgacctgcgtaacaagaacgtcaacggcaaagtggccgaaaacctgctgcacgacgcaggcatcacggtcaacaagaacatggtgcccttcgacgacaaatcaccattcgttaccagtggtatccgcgtcggtaccccggccatgaccacccgcggcatgaaggtcgccgaagctgaaaagatcgttgagttcatcgatcgcgtcatctcggcagccaacgacgacaacgtcgccgatgtctgcaaacaggtcagggccgaagtccgcgaactgtgcctgcagttcccgctgaacggctacggcttgcaggtgtaa

SEQ ID NO: 10286 - protein, 440 aa, Chlorobaculum parvum NCIB 8327
MDYELLKRLDPEVFEAIANETRRQTETLELIASENFTSTAVMEACGSVMTNKYAEGYPGKRYYGGCEFVDVAENLARDRAKKLFGCEYVNVQPHSGSSANMAVLFAVLKPGDSIMGLDLSHGGHLTHGSKVNFSGQFFDAHSYGVDKETGIIDMNAVEEMALKVKPKLIITGASAYSQGFDFKAFREIADKVGAFLMADIAHPAGLVAAGLSANPVPHCHFVTTTTHKTLRGPRGGMIMMGKDFENPMGITVNTKNGPRVKMMSEVIDAEVMPGIQGGPLMHIIAGKAVAFGEALQPEFKAYAQQIKDNAAAMAAKFLAADYHIVSGGTKNHLMLLDLRNKNVNGKVAENLLHDAGITVNKNMVPFDDKSPFVTSGIRVGTPAMTTRGMKVAEAEKIVEFIDRVISAANDDNVADVCKQVRAEVRELCLQFPLNGYGLQV

SEQ ID NO: 10287 - DNA, 1260 bp, Candidatus Phytoplasma mali
  CDS (1)..(1260): transl_table=11
atgaatcaagaaataaataatttttatataaaagaccaagaaatatttgatcaaattaaattagaagaaaaacgtcaaaaagaaagtataaatttaattgcttcagaaaattttgtttcacaagatgttttaaaagttcaaggaacaatattaacaaataaatatgcagaaggttatcctgaaaaaagattttacaacggttgtcagtatatcgatgaaatagaaaaaatagctattgaaagagcaactgaactttttaaagctaaatatgctaatgttcaacctcattctggttcacaagcaaacatggctgtttttcaagctttattaaaccctaatgatagaattttaggtttatctttgtcagatggtggacatttaacacacggaagtaaaatgaatttttctggaaaatattatgaatcttatttttatggattaaactctaaaacagaaacaattgattatgcagaagttgaaaaaatagcttttgccataaggccaaaattaattattacgggatattcttcatattcaaaaattattgattttaaatcttttcgtaaaattgccaacaaagttaatgcttatttaatggcagatatagcacacatttcaggtttagtagctagtggcttacatccttgtcctttggaggctcaagctgatgtagtaacatccactacacacaaaactttaagaggtcccagaggaggattaattttaaccaataataaagaaataataaataaaattaataaagctgtttttcctggcggacaaggcggacctttaatgcatataatagcagctaaagctgtagcttttaaagaagctttacattctgattttattaaatatcaaaaacaaatacttaaaaatgcttgcttttttgctgaaaatttacaaaaaaaaggttatcgaataattagtaaaagtaccgaaaaccatttatttttagtagatgtaaaaagtaaaaatccaaattttaccggtaaaaaaatatctgatattttaaataaagttaatattgtagtaaacaaaaatgttattccttttgataaagaaacaccccttataacaagtggtattagattgggtacacccgcaatgacaactagaggttttaaagaaaatgaatttgcaaaagtatctgattttatcgatgaagcaatcacaaatcataatgatttaaattatttgaataatttaaaacaaaaagttattacattatcaaaaaattttcctttaaagatataa

SEQ ID NO: 10288 - protein, 419 aa, Candidatus Phytoplasma mali
MNQEINNFYIKDQEIFDQIKLEEKRQKESINLIASENFVSQDVLKVQGTILTNKYAEGYPEKRFYNGCQYIDEIEKIAIERATELFKAKYANVQPHSGSQANMAVFQALLNPNDRILGLSLSDGGHLTHGSKMNFSGKYYESYFYGLNSKTETIDYAEVEKIAFAIRPKLIITGYSSYSKIIDFKSFRKIANKVNAYLMADIAHISGLVASGLHPCPLEAQADVVTSTTHKTLRGPRGGLILTNNKEIINKINKAVFPGGQGGPLMHIIAAKAVAFKEALHSDFIKYQKQILKNACFFAENLQKKGYRIISKSTENHLFLVDVKSKNPNFTGKKISDILNKVNIVVNKNVIPFDKETPLITSGIRLGTPAMTTRGFKENEFAKVSDFIDEAITNHNDLNYLNNLKQKVITLSKNFPLKI

SEQ ID NO: 10289 - DNA, 1248 bp, Cupriavidus taiwanensis
  CDS (1)..(1248): transl_table=11
atgttcgaacgcagccgttttacgatcgaccagatcgaccccgaggtctttgccgccatccagcaggaaaaccagcgccaggaagaccacatcgagctgatcgcctccgagaactacacctcgcccgcggtgatggccgcgcagggttcgcagctgaccaacaagtatgccgagggctatcccggcaagcgctactacggcggttgcgagtacgtcgacatcgtcgagcagctggccattgatcgcgtcaagcagctgttcggcgccgaggccgccaacgtgcagcccaactcgggctcgcaggccaaccagggcgtgtacttcgccgtgctcaagccgggcgacaccatcatgggcatgagcctggccgaaggcggccacctgacccacggcatggcgctgaacatgagcggcaagtggttcaacgtggtcagctacggcctgaacgcccaggaagacatcgactacgacgcgctggaaaagctggcgcaagagaagaagcccaagctgatcatcgccggtgcctcggccttcgcgctgcgcatcgacttcgagcgcatcggcaaggtggccaagtcgatcggcgcctatttcatggtcgacatggcccactacgccggcctgatcgccgcgggcgtctacccgaacccggttccgcacgccgacttcgtcaccaccaccacccacaagagcctgcgcggcccgcgcggcggcgtgatcctgatgaaggccgagcacgagaaggcgatcaactcgtcgatcttccccggcatccagggcggcccgctgatgcacgtaatcgccggcaaggcggtggcgttcaaggaagcgctgacgccggaattcaaggcctaccagcagcaggtggtgaagaacgccgcggtgctggccgagaccctgatcgcgcgcggcctgcgcatcgtctcgggccgcaccgagagccacgtgatgctggtcgacctgcgcgccaagaacatcaccggcaaggaagccgagcgcatcctgggcgaggcgcacctgaccgtgaacaagaacgcgattccgaacgacccggaaaagccgttcgtcacctcgggcatccgcgtcggctcgccggccatgaccacgcgcggcttcaaggaagaagaagcccgcatcgtcggcaacctgatcgccgacgtgctggacaacccgcacgacgccgccaacatcgccgcggtgcgcgagcaggtgtcggccctgaccaagcgtttcccggtctacggctga

SEQ ID NO: 10290 - protein, 415 aa, Cupriavidus taiwanensis
MFERSRFTIDQIDPEVFAAIQQENQRQEDHIELIASENYTSPAVMAAQGSQLTNKYAEGYPGKRYYGGCEYVDIVEQLAIDRVKQLFGAEAANVQPNSGSQANQGVYFAVLKPGDTIMGMSLAEGGHLTHGMALNMSGKWFNVVSYGLNAQEDIDYDALEKLAQEKKPKLIIAGASAFALRIDFERIGKVAKSIGAYFMVDMAHYAGLIAAGVYPNPVPHADFVTTTTHKSLRGPRGGVILMKAEHEKAINSSIFPGIQGGPLMHVIAGKAVAFKEALTPEFKAYQQQVVKNAAVLAETLIARGLRIVSGRTESHVMLVDLRAKNITGKEAERILGEAHLTVNKNAIPNDPEKPFVTSGIRVGSPAMTTRGFKEEEARIVGNLIADVLDNPHDAANIAAVREQVSALTKRFPVYG

SEQ ID NO: 10291 - DNA, 1317 bp, Pelodictyon phaeoclathratiforme BU-1
  CDS (1)..(1317): transl_table=11
atggataccgacatccttcaaaaacaggatagtgagctttttgaggcaattgccaaagagaccggccgtcagacagagacgcttgaactgattgcttccgaaaatttcaccagtcgtgcggtcatgcaggcttgtggttcagtgatgaccaataaatatgcagaaggctatcccggcaaacgctattatggcggttgtgaatttgttgatatagccgaaaaccttgcgcgtgaccgggcgaaaaagctttttggctgtgattatgtcaatgtgcagcctcattcaggctcaagcgccaatatggcggttcttttttcggtactgaaacccggtgaccgcatcatgggacttgatttgtcacacggaggccacctgactcatggcagttctgtcaatttttccggacagatgtacgaggcacactcctatggtgtcgatcgcgagacaggctgtattgatatgaacaaggttgaagaacttgccctgcaggttcgtccgaaactgattatctgtggtgcaagcgcctattcacagggctttgatgtaaaggccttcagggtaattgccgataaggtcggagcctttttgatggctgatatcgctcatcctgcagggctcattgctgccggtttactgggcaaccctttaccacattgtcattttgtgaccaccacgacccacaagactcttcgtggacctcgtggaggcatgatcatgatgggttccgacttcgaaaacccgatgggcattaccatcaagacgaaaacgggttcacggctgaaaatgatgtctgaggttatggatgctgaagtgatgccgggtattcagggaggtccgctgatgcatattattgccggcaaagccgttgctttcggcgaggcactgcagcctgcattccgtgactatgctgcccaggtcataaaaaatgctgcagcaatggctgaaaaatttacagagcttggttacaaaattgtcagtggcggaaccaaaaaccatcttatgctgcttgacttgcgcagcaagaacgttaccggcaaggttgccgaaaacctgctgcattcggctggcataaccgtcaacaagaacatggtgccttttgacgataagtcgccctttgtcacgagcggtatccgcgtcggtacccctgccatgacaacaagaggcatgaatgaagccgacagcgtccttattgccgagcttatcgacagggtcatcacctctgccgaaaagcctgatgttgccgacctctgtcgcagtgtccgggaggagatcaaggcgctttgcctgcgtaaccccattgacggatacacggtatag

SEQ ID NO: 10292 - protein, 438 aa, Pelodictyon phaeoclathratiforme BU-1
MDTDILQKQDSELFEAIAKETGRQTETLELIASENFTSRAVMQACGSVMTNKYAEGYPGKRYYGGCEFVDIAENLARDRAKKLFGCDYVNVQPHSGSSANMAVLFSVLKPGDRIMGLDLSHGGHLTHGSSVNFSGQMYEAHSYGVDRETGCIDMNKVEELALQVRPKLIICGASAYSQGFDVKAFRVIADKVGAFLMADIAHPAGLIAAGLLGNPLPHCHFVTTTTHKTLRGPRGGMIMMGSDFENPMGITIKTKTGSRLKMMSEVMDAEVMPGIQGGPLMHIIAGKAVAFGEALQPAFRDYAAQVIKNAAAMAEKFTELGYKIVSGGTKNHLMLLDLRSKNVTGKVAENLLHSAGITVNKNMVPFDDKSPFVTSGIRVGTPAMTTRGMNEADSVLIAELIDRVITSAEKPDVADLCRSVREEIKALCLRNPIDGYTV

SEQ ID NO: 10293 - DNA, 1254 bp, Stenotrophomonas maltophilia R551-3
  CDS (1)..(1254): transl_table=11
atgttcccgcgtgacgtccgcatcgaatcctacgatcccgaactggccaaggccatcgccgctgagacccagcgccaggaagaccacgtcgagctgatcgccagcgagaactacaccagcccggcggtgatggaagcccagggcagccagctgaccaacaagtacgccgaaggctacccgggcaagcgctactacggtggctgcgaatacgtggacatcgccgagcagctggcgatcgaccgtctgaagcagctgttcggcgccgactacgccaacgtgcagccgcacagtggttcgcaggccaaccaggccgtgtacttcgccctgctgcagccgggtgacaccatcctcggcatgagcctggcccacggcggccacctcacccacggtgccaaggtgaacgcctcgggcaagctgttcaacgccgtgcagtacggcgtgaacgaccagggcctgatcgactacgacgaagtcgagcgcctggccctggagcacaagccgaagatggtcgtggccggcttctcggcctactcgcaggtgatcgactgggcgcgcttccgcgccatcgccgacaaggtcggtgcctacctgttcgtcgacatggcacacgtcgccggcctggttgctgctggcgtctacccgagcccgctggaacatgcgcacgtggtcacctcgaccacccacaagaccctgcgcggcccgcgcggcggcatcatcgtcgccaagggcgccggcgaagacctggtcaagaagctgcagtcgatcgtgttcccgggcatccagggtggtccgctgatgcacgtcatcgccggcaaggccgtggccttcaaggaagcgctggaaccgggcttcaaggcctaccagcagcaggtggtgaagaacgcccaggcgatggccaacacgctcattgcgcgcggctacaagatcgtctccggtggcacccagaaccacctgatgctggtcgacatgatcggcaaggacgtgtccggcaaggacgcggaagccgcgctgggcaaggcccacatcaccgtcaacaagaactcggtgccgaacgacccgcgttcgccgttcgtcacttcgggcctgcgcctgggcaccccggcggtgaccacccgtggctacgtcgaacaggactgcgtggacctggccaactggatcgccgacgtgctcgacgcgccgagcgatgacgccgtcatcgcccgcgtgcgcgacgccgtcagcgcgcagtgccgcaagtacccggtctacggttga

SEQ ID NO: 10294 - protein, 417 aa, Stenotrophomonas maltophilia R551-3
MFPRDVRIESYDPELAKAIAAETQRQEDHVELIASENYTSPAVMEAQGSQLTNKYAEGYPGKRYYGGCEYVDIAEQLAIDRLKQLFGADYANVQPHSGSQANQAVYFALLQPGDTILGMSLAHGGHLTHGAKVNASGKLFNAVQYGVNDQGLIDYDEVERLALEHKPKMVVAGFSAYSQVIDWARFRAIADKVGAYLFVDMAHVAGLVAAGVYPSPLEHAHVVTSTTHKTLRGPRGGIIVAKGAGEDLVKKLQSIVFPGIQGGPLMHVIAGKAVAFKEALEPGFKAYQQQVVKNAQAMANTLIARGYKIVSGGTQNHLMLVDMIGKDVSGKDAEAALGKAHITVNKNSVPNDPRSPFVTSGLRLGTPAVTTRGYVEQDCVDLANWIADVLDAPSDDAVIARVRDAVSAQCRKYPVYG

SEQ ID NO: 10295 - DNA, 1308 bp, Vibrio cholerae V51
  CDS (1)..(1308): transl_table=11
atggagtcattgtgtggtttttttgcaatttcagtcaatctgagtcaggagatacagatgcttaagcgtgatatgaacatcgctgattacgatccggagctatacgctgccattcaggaagagacgcttcgtcaagaagaacatattgaacttattgcttcagaaaactacaccagcccgcgtgtaatgcaagcacaaggttctcaattgaccaacaagtacgccgaaggttatccaggtaagcgttactatggtggttgtgagtacgtggacaaagcagaagctttagcgattgatcgtgcttgccaactgtttggctgtgaatacgcgaacgttcagccgcactctggatctcaagcgaacagtgctgtgtacatggcgctgctcaacccaggtgacaccgtgctaggtatgagccttgctcacggtggtcatttgactcacggttcaccagttaacttctcgggtaagcactacaatgtgatcccttacggtatcgatgaagcgggtcaaattaactacgatgaaatggaagccttagcatttgaacataagccaaagatgatcatcggtggcttctcggcttactcacaaatcgtggattggaaacgcatgcgtgaaatcgccgataaagtgggtgcttacctgtttgttgacatggcacacgttgcgggtctgattgcggcgggtgtttacccaagcccagtgccttttgcacacattgtcacgaccaccacgcataaaacactggcaggtccacgcggtggcttgatcttgtcaaatgccggtgaggagatgtacaagaagctgaactctgcagtattccctggcggccaaggcggtcctttgatgcacgtgattgcggctaaagcggtggcgttcaaagaagcgatggagcctgagtttaaagagtatcaagcgcgtgtggtgaaaaacgccaaagccatggtggcgcagttccaagaacgtggttacaagatcgtctctaacagcacggaaaaccacttgttccttgttgatctgattgataaaaacatcacaggtaaagaagccgatgccgctctgggcgctgccaatatcacggttaacaagaactcggtaccaaatgacccacgcagcccgtttgtgacttcaggtatccgtgttggtacacctgcaatcactcgccgtggttttactgagcaagacgcaaaagatctcgccaactggatgtgtgatgttctagacaacatcgatgatcaaggtgtgattgaagcgacgaaacaaaaagtattggcgatctgtcaacgtctgcctgtttacgcttaa

SEQ ID NO: 10296 - protein, 435 aa, Vibrio cholerae V51
MESLCGFFAISVNLSQEIQMLKRDMNIADYDPELYAAIQEETLRQEEHIELIASENYTSPRVMQAQGSQLTNKYAEGYPGKRYYGGCEYVDKAEALAIDRACQLFGCEYANVQPHSGSQANSAVYMALLNPGDTVLGMSLAHGGHLTHGSPVNFSGKHYNVIPYGIDEAGQINYDEMEALAFEHKPKMIIGGFSAYSQIVDWKRMREIADKVGAYLFVDMAHVAGLIAAGVYPSPVPFAHIVTTTTHKTLAGPRGGLILSNAGEEMYKKLNSAVFPGGQGGPLMHVIAAKAVAFKEAMEPEFKEYQARVVKNAKAMVAQFQERGYKIVSNSTENHLFLVDLIDKNITGKEADAALGAANITVNKNSVPNDPRSPFVTSGIRVGTPAITRRGFTEQDAKDLANWMCDVLDNIDDQGVIEATKQKVLAICQRLPVYA

SEQ ID NO: 10297 - DNA, 1254 bp, Pseudomonas aeruginosa C3719
  CDS (1)..(1254): transl_table=11
atgttcagcaagcatgaccagatccgcggctacgacgacgaactgctcgccgcgatggacgccgaagaggcccgccaggaagaccatctcgaactgatcgcctcggagaactacaccagcaagcgggtcatgcaggcgcagggcagcggcctgaccaacaagtatgccgagggctatccgggcaagcgctactacggcggctgcgaacacgtcgacaaggtcgagcagttggccatcgaccgcgccaggcaactgttcggcgccgactacgccaacgtccagccgcattccggttcctcggccaacgccgcggtgtacctggcgctgctcaacgccggcgacaccatcctcggcatgagcctggcccacggcggccatctcacccacggcgccaaggtgtcctcctccggcaagctgtacaacgccgtgcagtacggcctggacaccgctaccgggctgatcgactacgacgaagtcgagcgcctggccgtggagcataagccgaagatgatcgtcgccggcttctccgcctactccaagaccctcgacttcccgcgcttccgcgccatcgccgacaaggtcggcgcgctgctgttcgtcgacatggcccacgtcgccgggctggtcgccgccggcctctacccgaacccgatccccttcgccgacgtggtcaccaccaccacccacaagaccctgcgcggcccgcgcggcgacctgatcctggcgcgcgccaacgaggagatcgagaagaagctcaattccgcggtattccccggcgcccagggcggcccgctgatgcacgtgatcgcggccaaggcggtgtgcttcaaggaagcgctggagccgggcttcaaggactaccaggcgcaggtgatccgcaacgccaaggcgatggccgaggtgttcatcgggcgcggctacgacgtggtttccggtggcaccgacaaccacctgatgctgatcagcctggtgcgccagggcctgaccggcaaggaagccgacgccgccctcggccgggtcggcatcacggtgaacaagaacgccgtgccgaacgatccgcagagcccgttcgtcacctccggcatccgcatcggcaccccagcggtgaccactcgcggtttccgcgaggggcagagccgcgaactggctggctggatctgcgacatcctcgaccacctcggcgatgccgacgtggaggccaaggtcgccacccaagtcgccggtctctgcgcggacttcccggtctatcgctga

SEQ ID NO: 10298 - protein, 417 aa, Pseudomonas aeruginosa C3719
MFSKHDQIRGYDDELLAAMDAEEARQEDHLELIASENYTSKRVMQAQGSGLTNKYAEGYPGKRYYGGCEHVDKVEQLAIDRARQLFGADYANVQPHSGSSANAAVYLALLNAGDTILGMSLAHGGHLTHGAKVSSSGKLYNAVQYGLDTATGLIDYDEVERLAVEHKPKMIVAGFSAYSKTLDFPRFRAIADKVGALLFVDMAHVAGLVAAGLYPNPIPFADVVTTTTHKTLRGPRGDLILARANEEIEKKLNSAVFPGAQGGPLMHVIAAKAVCFKEALEPGFKDYQAQVIRNAKAMAEVFIGRGYDVVSGGTDNHLMLISLVRQGLTGKEADAALGRVGITVNKNAVPNDPQSPFVTSGIRIGTPAVTTRGFREGQSRELAGWICDILDHLGDADVEAKVATQVAGLCADFPVYR

SEQ ID NO: 10299 - DNA, 1476 bp, Burkholderia cenocepacia PC184
  CDS (1)..(1476): transl_table=11
atgactggcgatagaaccctcagggttcaaggtggagcatcccaccgtgaagcgcggggcgccgtttttgccgttcgcctgggcagccgttgtgcgccgtcgcgtgcatcgctggtggctgtcctgcctcgcgtcatacggattcttccgccacgtcgagctggtctcgccagcagcgcaccgtactcggccactccggtcaacctgtacacacttaacggaaaccgtatgtttgacagagcccaaagcaccatcgcgaacgtcgatcccgaaatctttgcagcgatcgagcaggaaaaccgccgccaggaagatcacatcgagctgatcgcgtcggaaaactacacgagcccggccgtgatggccgcgcagggctcgcagctcacgaacaagtacgcggaagggtatccgggcaagcgctactacggcggttgcgagtacgttgacgtggtcgagcagctcgcgatcgaccgcgtgaagcagctgttcggcgcggaagcggcgaacgtgcagccgaactcgggttcgcaggcgaaccagggcgtgttcttcgcgatgctcaagccgggcgacacgatcatgggcatgagcctcgcgcacggcggccacctgacgcacggctcgccggtgaacatgtcgggcaagtggttcaacgtggtgagctacggcctgaacgagaacgaagacatcgactacgacgcggctgagaagctggcgaacgaacacaagccgaagctgatcgtcgcgggcgcatcggcattcgcgctgaagatcgatttcgagcgtctggcgaagatcgcgaagtcggtcggtgcatacctgatggtcgacatggcgcactacgcaggcctgatcgcggcgggcgtgtacccgaacccggtgccgcacgcggatttcgtgacgacgacgacgcacaagagcctgcgcggcccgcgcggcggcgtgatcctgatgaaggcggaatacgagaagccgatcaactcggcgatcttcccggggatccagggcggcccgctgatgcacgtgatcgcggcgaaggcggtggcgttcaaggaagcgctgtcgccggagttcaaggaatatcagcagaaggtggtcgagaacgcacgcgtgctggccgaaacattggtcaagcgcgggctgcggatcgtgtcgggccgtacggaaagccacgtgatgctggtggacctgcgcgcgaagcacatcacgggcaaggcggcggaagcggcgctcggcgcggcgcacatcacggtgaacaagaacgcgattccgaacgacccggaaaagccgttcgtgacgagcggcatccgtctcggctcgccggcgatgacgacgcgtggcttcgggccggcggaagccgaggaggtcggcaacctgatcgccgacgtgctggagaacccggaagacgcagcgacgatcgagcgcgtgcgcgcgcaggtcgccgagctgaccaagcgtttcccggtctatcgctga

SEQ ID NO: 10300 - protein, 491 aa, Burkholderia cenocepacia PC184
MTGDRTLRVQGGASHREARGAVFAVRLGSRCAPSRASLVAVLPRVIRILPPRRAGLASSAPYSATPVNLYTLNGNRMFDRAQSTIANVDPEIFAAIEQENRRQEDHIELIASENYTSPAVMAAQGSQLTNKYAEGYPGKRYYGGCEYVDVVEQLAIDRVKQLFGAEAANVQPNSGSQANQGVFFAMLKPGDTIMGMSLAHGGHLTHGSPVNMSGKWFNVVSYGLNENEDIDYDAAEKLANEHKPKLIVAGASAFALKIDFERLAKIAKSVGAYLMVDMAHYAGLIAAGVYPNPVPHADFVTTTTHKSLRGPRGGVILMKAEYEKPINSAIFPGIQGGPLMHVIAAKAVAFKEALSPEFKEYQQKVVENARVLAETLVKRGLRIVSGRTESHVMLVDLRAKHITGKAAEAALGAAHITVNKNAIPNDPEKPFVTSGIRLGSPAMTTRGFGPAEAEEVGNLIADVLENPEDAATIERVRAQVAELTKRFPVYR

SEQ ID NO: 10301 - DNA, 1248 bp, Geobacter bemidjiensis Bem
  CDS (1)..(1248): transl_table=11
atgtcagtactggaaacattcgatccggcagtcgcggaggtcatcaggcaagagaccgagcgtcaggagtacaacctcgaactgatcgcctcggagaacttcgtctccccggcggtgctcgaggcgcagggctcggtcctcaccaacaagtacgccgaagggtatcccggcaagcgttactacggcggttgccattgcgtcgacgtggtggagaacctcgccatcgaccgcgccaaggaactcttcggcgccgatcacgtcaacgtgcagccgcactccggttcccaggccaacatggctgtctacttctccgtgctgaagcccggcgacaccgtgctcgggatgaacctggcccacggcggccacctgacccacggcagcccggtcaacttctccggcaagctcttcaacatcgtcccctacggcgtgtccaaagagacccagaccatcgactacgaggagaccgagcgcctcgccctcgagcacaagccgaagatgatcgtcgtcggcgcctccgcctacccgcgcatcatcgacttcgaggccttccgccgcatcgccgacaaggtgggagccgtggtcatggtggacatggcgcacatcgccggcctcgtcgcggcagggctgcacccgagcccggttccctacgccgagttcgtcaccaccaccacccacaagaccctgcgcggaccgcgcggcggcatgatcatgtgccgcgaggactgggccaagaccctcaactccaacatcttcccgggcatccagggcggcccgctcatgcacgtgatcgcagccaaggcagtcgccttcaaggaggcgctgaccccggagttcaagcagtaccaggggcagatcgtgaagaacgccaaggcgctagccgaagggctcaccaagcgcggcttcaagctcacctccggcgggaccgacaaccacctgatgctggtggacctctcccagaccgagctgaccggcaaggtagccgaagaggcgctcgaccgcgccgggatcaccgtcaacaagaacggcatccccttcgacacccgctcgccgttcatcacctccggcatccgcatcggcaccccggctgcgaccagccacgggctgaaagaggccgagatggagcaggtggcagggttcatcgccgaggtcctgggcaacgtcagcgacgaggccaagctcgccgcagtaaagacccaggtcaacgcgctgatgaagcgtttccccatgtacgccaaccgcctcgtctag

SEQ ID NO: 10302 - protein, 415 aa, Geobacter bemidjiensis Bem
MSVLETFDPAVAEVIRQETERQEYNLELIASENFVSPAVLEAQGSVLTNKYAEGYPGKRYYGGCHCVDVVENLAIDRAKELFGADHVNVQPHSGSQANMAVYFSVLKPGDTVLGMNLAHGGHLTHGSPVNFSGKLFNIVPYGVSKETQTIDYEETERLALEHKPKMIVVGASAYPRIIDFEAFRRIADKVGAVVMVDMAHIAGLVAAGLHPSPVPYAEFVTTTTHKTLRGPRGGMIMCREDWAKTLNSNIFPGIQGGPLMHVIAAKAVAFKEALTPEFKQYQGQIVKNAKALAEGLTKRGFKLTSGGTDNHLMLVDLSQTELTGKVAEEALDRAGITVNKNGIPFDTRSPFITSGIRIGTPAATSHGLKEAEMEQVAGFIAEVLGNVSDEAKLAAVKTQVNALMKRFPMYANRLV

SEQ ID NO: 10303 - DNA, 1254 bp, Proteus mirabilis HI4320
  CDS (1)..(1254): transl_table=11
atgttaaaacgtgaaatgaatattgctgattacgatccggaattatggaatgcaatggaaggtgaagtgactcgtcaagaagagcacatcgaattaattgcttctgaaaactatactagtcctcgtgttatgcaggcgcagggatctcagctgaccaacaaatatgcagaaggttatccaggtaaacgctactacggcggttgtgaatacgttgatgttgttgaacaattagctattgatcgtgccaaagcactatttggtgctgattatgcaaacgtacaacctcactctggatcacaagcgaatgcggctgtgtatatggcattacttaaaccgggtgatacagtattagggatgaatttggcccaaggtggtcacttaactcacggctctccggttaacttctctggtaaactctacaatatcgttccttatggtattgatgaagccggtaaaattgattaccaagatatcgctgagcaagctaaaaagcataaaccaaaaatgatcattggtggtttttcagcttattcaggtttggttgattgggctaaaatgcgtgaaatcgcagatagtgtaggggcttacttatttgtcgatatggctcacgttgcaggtatgattgcagcgggtgtctatccaaacccagtaccacatgctcacgttgtgactacaacaacacacaaaacattagcaggtcctcgtggtggtcttatccttgctaagggtggcgatgaagagttttataagaaattaaactctgccgtattccctggctctcaaggtggtcctttaatgcatgtgatcgcgggtaaagccgttgcattaaaagaagcaatggaacctgagtttaaagtttaccagcaacaagttgcaaaaaatgcgaaagcaatggtagacgttttcttagcgcgcggttataaagtagtatctggtggcacagagaaccacctgtttttattagacttagttgataaagatattacaggtaaagatgctgatgctgcactgggtcgtgctaatatcactgtgaacaaaaatagtgtgccaaatgatcctcgcagtccatttgttacatctggtattcgtattggttctcctgcgattacacgtcgtggttttaaagaagcggaagcaaaagatttagccggttggatgtgtgatgtccttgataatatcaatgatgaagcgaacattgaaaaagtgaaacaaaaagtcttggatatctgcgctaaatttccagtttacgcataa

SEQ ID NO: 10304 - protein, 417 aa, Proteus mirabilis HI4320
MLKREMNIADYDPELWNAMEGEVTRQEEHIELIASENYTSPRVMQAQGSQLTNKYAEGYPGKRYYGGCEYVDVVEQLAIDRAKALFGADYANVQPHSGSQANAAVYMALLKPGDTVLGMNLAQGGHLTHGSPVNFSGKLYNIVPYGIDEAGKIDYQDIAEQAKKHKPKMIIGGFSAYSGLVDWAKMREIADSVGAYLFVDMAHVAGMIAAGVYPNPVPHAHVVTTTTHKTLAGPRGGLILAKGGDEEFYKKLNSAVFPGSQGGPLMHVIAGKAVALKEAMEPEFKVYQQQVAKNAKAMVDVFLARGYKVVSGGTENHLFLLDLVDKDITGKDADAALGRANITVNKNSVPNDPRSPFVTSGIRIGSPAITRRGFKEAEAKDLAGWMCDVLDNINDEANIEKVKQKVLDICAKFPVYA

SEQ ID NO: 10305 - DNA, 1245 bp, Acidithiobacillus ferrooxidans ATCC 53993
  CDS (1)..(1245): transl_table=11
atgttttccaaaaccctgaccatcgctgattttgaccccgtgctttgggatgccatgcgcaaagaggcccggcgccaggaggatcatgtcgagctcatcgcttccgagaactatgccagccccatggtaatggcggcgcagggctcggtgctgaccaacaaatacgcagaaggctatcctggtaaacgctactatggcggctgcgagtacgtagatatcgccgagcagctcgccatggaccgtgcgctggagcttttcggcgctgaacatgccaatgtccaggctcattccggctcgcaggccaatcaggctgtttacttgtccgtgctccagcccggtgacaagatcatgggcatgagtcttgcccatggcggccacctgacccatggcgccaaagtgaacgtgtccggcaagctttttcaggtggcggcttacggcgtgcgcgcggaagacggccgcatcgattatgacgccatggcggagcaggcggagcgggaacgcccgaagatgatcgttgccggtgccagtgcctactctcgcgtcatcgacttcgcccgcatcggcgagattgcccgcagcatcggcgcctatctgctggtggacatggcgcacatcgccggccttgtggccacgggcctgcatcccagccccgtgccccatgcggattttgtcaccaccaccacccacaagaccctgcgcggtcctcgcggcggattgatcctctgtcgggagcaatatgccaaaaaggtgaactccctgatcttccccggcttacagggggggccgctgatgcatgtcatcgctgccaaggccgtcgccttccgtgaagcgctgcagccggagttcaagtcctatcagcagcaggtcattcataacgcgcaaaccttgagcaaggtgttggccgggcgtggttatggcgcggtttcgggtggcaccgacaaccatctcttcttgctgaacctgggcgaaaaagtcacgggtaaggaggcggaagaggcactgggacaggccaatatcaccgtcaacaagaatgccgtgcccttcgatatccgccccccggcggttaccagcggcatccggattggtacgccggccgctaccacgcgtggctttggcgaggccgaaatgcatcgcctgggcaacggcattgctgatgtcctggatgcgagcagcgatgctgcggtcattgagcgggtccgtgcagatatgaaggccctctgccatcagtttccggtatacggctga

SEQ ID NO: 10306 - protein, 414 aa, Acidithiobacillus ferrooxidans ATCC 53993
MFSKTLTIADFDPVLWDAMRKEARRQEDHVELIASENYASPMVMAAQGSVLTNKYAEGYPGKRYYGGCEYVDIAEQLAMDRALELFGAEHANVQAHSGSQANQAVYLSVLQPGDKIMGMSLAHGGHLTHGAKVNVSGKLFQVAAYGVRAEDGRIDYDAMAEQAERERPKMIVAGASAYSRVIDFARIGEIARSIGAYLLVDMAHIAGLVATGLHPSPVPHADFVTTTTHKTLRGPRGGLILCREQYAKKVNSLIFPGLQGGPLMHVIAAKAVAFREALQPEFKSYQQQVIHNAQTLSKVLAGRGYGAVSGGTDNHLFLLNLGEKVTGKEAEEALGQANITVNKNAVPFDIRPPAVTSGIRIGTPAATTRGFGEAEMHRLGNGIADVLDASSDAAVIERVRADMKALCHQFPVYG

SEQ ID NO: 10307 - DNA, 1254 bp, Borrelia duttonii Ly
  CDS (1)..(1254): transl_table=11
atgatagataacattctatttgatttaattgaaagagaagctaaaagagagagagaaaatattgagttaattgcttcagagaattttgtttcatcagatgttagacaagctgttggaagtgttttgaccaataaatatgccgaagggtatccttcaaagagatattatggtggatgttctgttgttgatgatattgaaaatttagccatatcacgagctatggaattattcggtgcaagttatgctaatgttcagcctcatagtggttctcaagctaatatggctgctataatgtcacttattaagcctggggataaaattcttgggatggaattgtctcatggtggtcatttgactcatggtagtaaggttagtttttctggtatgttttttgatgcatattcttatggtgtttcaagagattctgagatgattgattacgatgatgttaaaaacatagctaaggcatgtagaccaaatttgatcattgctggtgcatcttcttattcaagagaaattgattttaagaagtttcgtgaaatagcaaatgaagtttcagcttatcttttatgtgatattgctcatacggcaggtcttgttgctacgggttttcataattctcctattgatgttgcacatttaactacaagtactactcataaaactttaagaggtcctagaggaggcttaattcttgcaggtaaagagtttaatacaatgatcaattataataataaagagagaactttagattcagctgttaattcttgtgtttttccaggaacccaagggggacctttaatgcatgttattgcgggcaaagcagtggctttcaaagaggcattaaataaagagtttaaagattatatttctagggttatagagaatactaaagctatggctgagtattttatttcagagggtcttagaatagttagtggtggtacagataatcatttgtttttggttgatcttagtggtttaggtattacgggagctgatgctgagaagattcttgaaagtgtaaatattacgcttaataaaaatgcaattccttttgattctaaaaatccttctgtagcttctggaattagaattggtgctcctgctattacttcacgaggtttaaatagagatgattctattaaagttgctcattttattattagagctttaaagacaaaatctactgatgaacttagaaagataaaacaagaagttatagggtttattagtagttttgatatgccttag

SEQ ID NO: 10308 - protein, 417 aa, Borrelia duttonii Ly
MIDNILFDLIEREAKRERENIELIASENFVSSDVRQAVGSVLTNKYAEGYPSKRYYGGCSVVDDIENLAISRAMELFGASYANVQPHSGSQANMAAIMSLIKPGDKILGMELSHGGHLTHGSKVSFSGMFFDAYSYGVSRDSEMIDYDDVKNIAKACRPNLIIAGASSYSREIDFKKFREIANEVSAYLLCDIAHTAGLVATGFHNSPIDVAHLTTSTTHKTLRGPRGGLILAGKEFNTMINYNNKERTLDSAVNSCVFPGTQGGPLMHVIAGKAVAFKEALNKEFKDYISRVIENTKAMAEYFISEGLRIVSGGTDNHLFLVDLSGLGITGADAEKILESVNITLNKNAIPFDSKNPSVASGIRIGAPAITSRGLNRDDSIKVAHFIIRALKTKSTDELRKIKQEVIGFISSFDMP

SEQ ID NO: 10309 - DNA, 1254 bp, Borrelia recurrentis A1
  CDS (1)..(1254): transl_table=11
atgatagataacattctatttgatttaattgaaagagaagctaaaagagagagagaaaatattgagttaattgcttcagagaattttgtttcatcagatgtgagacaagctgttggaagtgttttgaccaataaatatgccgaagggtatccttcaaagagatattatggtggatgttctgttgttgatgatattgaaaatttagccatatcacgagctatggaattattcggtgcaagttatgctaatgttcagcctcatagtggttctcaagctaatatggctgctataatgtcacttattaagcctggggataaaattcttgggatggaattgtctcatggtggtcatttgactcatggtagtaaggttagtttttctggtatgttttttgatgcatattcttatggtgtttcaagagattctgagatgattgattacgatgatgttagaaacatagctaaggcatgtaggccaaatttgatcattgctggtgcatcttcttattcaagagaaattgattttaagaagtttcgtgaaatagcaaatgaagtttcagcttatcttttatgtgatattgctcatacggcaggtcttgttgctacgggttttcataattctcctattgatgttgcacatttaactacaagtactactcataaaactttaagaggtcctagaggaggcttaattcttgcaggtaaagagtttaatacgatgatcaattataataataaagagagaactttagatttagctgttaattcttgtgtttttccaggaactcaaggtggacctttaatgcatgttattgcgggcaaagcagtggctttcaaagaggcattaaataaagagtttaaagattatatttctagggttatagagaatactaaagctatggctgagtattttatttcagagggtcttagaatagttagtggtggtacagataatcatttgtttttggttgatcttagtggtttaggtattacgggagctgatgctgagaagattcttgaaagtgtaaatattacgcttaataaaaatgcaattccttttgattctaaaaatccttctgtagcttctggaattagaattggtgctcctgctattacttcacgaggtttaaatagagatgattctattaaagttgctcattttattattagagctttaaagacaaaatctactgatgaacttagaaagataaaacaagaagttatagggtttattagtagttttgatatgccttag

SEQ ID NO: 10310 - protein, 417 aa, Borrelia recurrentis A1
MIDNILFDLIEREAKRERENIELIASENFVSSDVRQAVGSVLTNKYAEGYPSKRYYGGCSVVDDIENLAISRAMELFGASYANVQPHSGSQANMAAIMSLIKPGDKILGMELSHGGHLTHGSKVSFSGMFFDAYSYGVSRDSEMIDYDDVRNIAKACRPNLIIAGASSYSREIDFKKFREIANEVSAYLLCDIAHTAGLVATGFHNSPIDVAHLTTSTTHKTLRGPRGGLILAGKEFNTMINYNNKERTLDLAVNSCVFPGTQGGPLMHVIAGKAVAFKEALNKEFKDYISRVIENTKAMAEYFISEGLRIVSGGTDNHLFLVDLSGLGITGADAEKILESVNITLNKNAIPFDSKNPSVASGIRIGAPAITSRGLNRDDSIKVAHFIIRALKTKSTDELRKIKQEVIGFISSFDMP

SEQ ID NO: 10311 - DNA, 1254 bp, Klebsiella pneumoniae 342
  CDS (1)..(1254): transl_table=11
atgttaaagcgtgaaatgaacattgccgattatgatgccgaactgtggcaggctatggagcaggaaaaagtacgtcaggaagagcacatcgaactgatcgcctccgaaaactacaccagtccgcgcgtcatgcaggcgcagggctctcagctgaccaacaaatatgctgaagggtatccgggcaagcgttactacggcggctgtgaatatgtcgacgtggttgagcaactggctatcgaccgcgcgaaagaactgttcggcgctgactatgctaacgtccagccgcactccggctctcaggctaactttgcggtctacaccgcgctgctgcagccgggcgataccgtgctcggtatgaacctggcgcagggcggccacctgactcacggctctccggtgaacttctccggcaaactgtacaacatcatcccttacggtattgatgagtccggtaaaattgactatgacgacatggcgaagcaggctcaggaacacaaaccgaagatgatcatcggtggtttctccgcttactccggtatcgttgactgggcgaaaatgcgtgaaatcgccgacagcatcggcgcttacctgttcgtcgatatggcgcacgtggctggcctgattgccgcgggtgtgtatccgaacccggttccgcatgctcacgttgtgaccaccaccacccacaaaaccctggcgggtccgcgcggcggcctgatcctggcgaaaggcggtagcgaagagctgtacaaaaaactgaactctgccgtgttcccaagcgcgcagggcggcccgctgatgcacgttatcgcggcgaaagcggtggcgctgaaagaagcgatggagccagagtttaaagtttaccagcagcaggttgcgaaaaacgccaaagcgatggtggaagtgttcctgaaccgcggctacaaagtggtttctggcggtactgagaaccacctgttcctgctggatctggtggataaaaacctgaccggtaaagaagctgacgccgccctgggccgcgccaacatcaccgtgaacaaaaacagcgtgccgaacgatccgaagagcccgttcgtgacttccggtatccgtatcggttctccggctgtgactcgccgcggcttcaaagaagcggaagttaaagagctggctggctggatgtgtgacgtgctggacaatatcaatgacgaagcggtcattgaacgtgtgaaaggcaaagtgctggatatctgcgcccgcttcccggtttatgcgtaa

SEQ ID NO: 10312 - protein, 417 aa, Klebsiella pneumoniae 342
MLKREMNIADYDAELWQAMEQEKVRQEEHIELIASENYTSPRVMQAQGSQLTNKYAEGYPGKRYYGGCEYVDVVEQLAIDRAKELFGADYANVQPHSGSQANFAVYTALLQPGDTVLGMNLAQGGHLTHGSPVNFSGKLYNIIPYGIDESGKIDYDDMAKQAQEHKPKMIIGGFSAYSGIVDWAKMREIADSIGAYLFVDMAHVAGLIAAGVYPNPVPHAHVVTTTTHKTLAGPRGGLILAKGGSEELYKKLNSAVFPSAQGGPLMHVIAAKAVALKEAMEPEFKVYQQQVAKNAKAMVEVFLNRGYKVVSGGTENHLFLLDLVDKNLTGKEADAALGRANITVNKNSVPNDPKSPFVTSGIRIGSPAVTRRGFKEAEVKELAGWMCDVLDNINDEAVIERVKGKVLDICARFPVYA

SEQ ID NO: 10313 - DNA, 1239 bp, Thermodesulfovibrio yellowstonii DSM 11347
  CDS (1)..(1239): transl_table=11
atgaagatgaaatctttaagagaagtggatgctgaaatttattctttgatacttcaagagaagaaaagagagacgaataaaattctaatgatagcctctgaaaactatgcaagtagagctgttatggaagctcagggttcactatttaccaataaatatgctgaaggttatcctggtagaagatattatggtggttgtgagtatgctgatgaagtagaaagacttgcccaggaaagagcaaaacaactttttaatgttgaacatgtaaatgtacagccacattctggaacacaggcaaatatggctgtttattttgcaatgctacagccaggagatacaataatgggaatgagtctaactcatggtggacatttatcacatggctcacctgtcaactttacaggcaagttatataaaactgtattttatggagtaaataaagaaacaggctatattgacatggatgaagtaaggagacttgcacaggaacacaaacccaaaataattattacaggagcaagtgcctatccaagaactattgattttaaagcatttagtgagatagcaaaagaagttggtgcttatttaatggcagacattgcacatattgctggcttaattgcaacaagtatgcatccaagccctgtcccttactcagattttattactaccacaacccataaaacccttaggggtccaagaggtggtgtagtaatgtgcaaagctcagtatgcaaaagccattgataaaacagttttccctgggattcagggtggacctcttgtccatgtaatagcagctaaagctgttgcctttaaagaagcgctttcagaagatttcaaagaatatcaaaaaaaagttataaaaaatgcgaaaacactcgctgaagcattaaaaaagaaaggttttaaacttgtatctgatggaacagataatcacctcatgcttgttgaccttactaattttaatataacagggaaggaagcagaggaagctcttgacaaagctggaataacagttaataaaaatactattccctttgatacaaaacctcctacagttacatctggtataagaattggaactccttctgtaacaactcgtggaatgggtgaagaggagatggaaaaaattgctgaaataattgaaagggttataaagaatatctcaaatgattcagttataaaagatatgcaaaaaaaagttcaagaactctgtaagaaatttccaatctattaa

SEQ ID NO: 10314 - protein, 412 aa, Thermodesulfovibrio yellowstonii DSM 11347
MKMKSLREVDAEIYSLILQEKKRETNKILMIASENYASRAVMEAQGSLFTNKYAEGYPGRRYYGGCEYADEVERLAQERAKQLFNVEHVNVQPHSGTQANMAVYFAMLQPGDTIMGMSLTHGGHLSHGSPVNFTGKLYKTVFYGVNKETGYIDMDEVRRLAQEHKPKIIITGASAYPRTIDFKAFSEIAKEVGAYLMADIAHIAGLIATSMHPSPVPYSDFITTTTHKTLRGPRGGVVMCKAQYAKAIDKTVFPGIQGGPLVHVIAAKAVAFKEALSEDFKEYQKKVIKNAKTLAEALKKKGFKLVSDGTDNHLMLVDLTNFNITGKEAEEALDKAGITVNKNTIPFDTKPPTVTSGIRIGTPSVTTRGMGEEEMEKIAEIIERVIKNISNDSVIKDMQKKVQELCKKFPIY

SEQ ID NO: 10315 - DNA, 1248 bp, Ralstonia solanacearum MolK2
  CDS (1)..(1248): transl_table=11
atgttcgaacgcagccgctatacgatcgaccagatcgacccagaagtcttcgccgccatccagcaggaaaaccagcgccaggaagaccacatcgagctgatcgcctccgagaactacacctcgccggccgtgatggccgcccagggctcgcagctgaccaacaagtacgccgagggctaccccggcaagcgttactacggcggttgcgaacacgtggacgtggtcgagcagctcgccatcgaccgcgtgaagcagctcttcggcgccgaagccgccaacgtgcagccgaactccggctcgcaggccaaccagggcgtgttcttcgccgtgctcaagccgggcgacaccatcatgggcatgagcctcgccgaaggcggtcacctgacccacggcatggcactcaacatgagcggcaagtggttcaacgtggtcagctacggcctgaacgcgcaggaagacatcgactacgacgcactcgaagcgctggcgcaagagaagaagcccaaactcatcatcgccggcgcatccgcattcgcgctgcgcatcgatttcgagcgcatcggcaagatcgccaaatcgatcggcgcgtacttcatggtggacatggcccactacgccggcctgatcgccgcgggcgtgtacccgaacccggtgccgcacgccgacttcgtcaccacgaccacccacaagagcctgcgcggcccgcgcggcggcgtgatcctgatgaaggccgagcacgagaaggccgtcaactcggcgatcttccccggcatccagggcggcccgctgatgcacgtgatcgcgggcaaagcggtggcattcaaggaagccctgtcgccggagttcaaggcctatcaggaacaagtcgtgaagaatgcacgcgccctggccgaaacgctgatggcccgcggccttcgcatcgtctccggccgcaccgaaagccacgtgatgctggtcgacctgcgcgccaagcagatcaccggcaaggaagccgagaaggtgctgggcaacgcgcacatcaccgtcaacaagaacgccatcccgaacgatccggagaaacccttcgtgacctcgggcatccgcctcggctcgccggccatgaccacgcgcggcttcaaggaagccgaggctgtgaaggtggcccacctgatcgccgatgtgctggataatccgcatgacgaagcgaacatcgcggccgtgcgcgccaaggtggccgaactgaccaagcagtacccggtctacgcctga

SEQ ID NO: 10316 - protein, 415 aa, Ralstonia solanacearum MolK2
MFERSRYTIDQIDPEVFAAIQQENQRQEDHIELIASENYTSPAVMAAQGSQLTNKYAEGYPGKRYYGGCEHVDVVEQLAIDRVKQLFGAEAANVQPNSGSQANQGVFFAVLKPGDTIMGMSLAEGGHLTHGMALNMSGKWFNVVSYGLNAQEDIDYDALEALAQEKKPKLIIAGASAFALRIDFERIGKIAKSIGAYFMVDMAHYAGLIAAGVYPNPVPHADFVTTTTHKSLRGPRGGVILMKAEHEKAVNSAIFPGIQGGPLMHVIAGKAVAFKEALSPEFKAYQEQVVKNARALAETLMARGLRIVSGRTESHVMLVDLRAKQITGKEAEKVLGNAHITVNKNAIPNDPEKPFVTSGIRLGSPAMTTRGFKEAEAVKVAHLIADVLDNPHDEANIAAVRAKVAELTKQYPVYA

SEQ ID NO: 10317 - DNA, 1299 bp, Gluconacetobacter diazotrophicus PAl 5
  CDS (1)..(1299): transl_table=11
atgccggaccagatgagccagagcgggttgcacgcctatttccgctccccgcttgccgaacgcgatcccctggtcgcggagatcatcgcgggtgaactggagcgccagcgcgacggaatcgaactgatcgccagcgagaacatggtgtccgaggcggtgctgcaggcgcagggcagcgtgctgacgaacaaatacgccgagggttatcccggccgccgctattacggcggctgcgccgaggtggacaaggtcgagagcctggccatcgagcgggtgaagacgctgttcggcgcgggcttcgcgaacgtgcagccccattccggcgccaacgcgaaccaggcggcgttcatggcgctggtcagcccgggcgataccatcctgggcatgagcctggcggcgggcggccacctgacgcacggggcggcgccgaactattccggcaaatggttccgcgcggtgcagtacggcgtgcggcgcgaggacgggctgctggattacgaggagatggagcgcctggcccgggccgagaagccgaagctgatcgtggcggggggctcggcctatccgcgcgcgatcgatttcgcccgcttccgcgccatcgcggacgaagtcggggcctacctgatggtcgacatggcccattatgccggactggtcgcggcgggcctgtatccctcgccgatggcgcatgcgcatgtggtgaccagcacgacgcacaagaccctgcgcggcccgcgcggcggcctgatcctgacgaatgacgcggacctggcgaagaagatcaactcggcggtcttccccgggctgcagggcggcccgctgatgcacgtgatcgcggccaaggccgtggcgttcggcgaggcgctgcagccggaattccgcgcctatcaggaagcggtggcggcgaatgcccgcgtgctggcggaaacgctgctgtcgcgcgggttcgacatcgtgacggggggcacggacagccacctgctgctggtggacctgcgccccaagaaggtcacgggccgcgccgccgaacgcagcctggaacgcgccgggatcaccgcgaacaagaacgcggtgccgttcgacccggaaaagccggcgatcacgtcggggattcgcctgggcagccccgccgccacggcgcgcggcttcggcaccgacgaattccgcgcggtgggcgagatgatcgacgaggtcctgaccgccatggccggcaagggcgaggacggatgccccgccaccgaacaggcggtgcacgacaaggtccgcgccctgtgcgcgcgcttcccgatctatcgctag

SEQ ID NO: 10318 - protein, 432 aa, Gluconacetobacter diazotrophicus PAl 5
MPDQMSQSGLHAYFRSPLAERDPLVAEIIAGELERQRDGIELIASENMVSEAVLQAQGSVLTNKYAEGYPGRRYYGGCAEVDKVESLAIERVKTLFGAGFANVQPHSGANANQAAFMALVSPGDTILGMSLAAGGHLTHGAAPNYSGKWFRAVQYGVRREDGLLDYEEMERLARAEKPKLIVAGGSAYPRAIDFARFRAIADEVGAYLMVDMAHYAGLVAAGLYPSPMAHAHVVTSTTHKTLRGPRGGLILTNDADLAKKINSAVFPGLQGGPLMHVIAAKAVAFGEALQPEFRAYQEAVAANARVLAETLLSRGFDIVTGGTDSHLLLVDLRPKKVTGRAAERSLERAGITANKNAVPFDPEKPAITSGIRLGSPAATARGFGTDEFRAVGEMIDEVLTAMAGKGEDGCPATEQAVHDKVRALCARFPIYR

SEQ ID NO: 10319 - DNA, 1242 bp, Anoxybacillus flavithermus WK1
  CDS (1)..(1242): transl_table=11
ttgtcaatgagtcgcttgtcacagcaagatccgcaagtatttcaagctattcaagatgaattgaaacgacaacaaacaaaaattgaattaattgcatcagaaaacttcgttagcgaagcggtgatggaagcgcaaggatcagtattaacgaacaagtatgctgaaggatatccaggccgtcgctattacggcggttgtgaacatgttgacgtcgtggaagagcttgcgcgcgaacgtgcaaaacaattgttcggagcggaacatgcaaatgttcaaccacactcgggagcgcaagcgaatatggcggtatattttacaattttacaacatggggatactgtgcttggcatgaacttatcgcacggtgggcatttaacgcacggaagcccggtaaactttagcggtatccaatacaatttcattgaatacggcgttgacccagaaacgcaccgtattaattacgatgacgttcgtgaaaaagcattaaagcataaaccgaaattaatcgttgctggggcaagcgcatatccgcgcacgattgactttgcgaagtttcgtgaaatcgctgatgaagtaggcgcctatttcatggtcgatatggcccacatcgcaggacttgtcgcggcaggattgcatccaaatcctgttccgtatgcccattttgtaacgacaacgacgcataaaacgttgcgcggtccgcgcgggggcatgattttatgccaagagcagtttgctaaacaaattgataaagcgattttcccaggcattcaaggcggcccgcttatgcatgttatcgcagctaaagctgtggcgctcggtgaggcgttacaagacgatttcaaaacgtatgcgcaaaacattgtaaacaatgcgaaacgtttagcggaagcgctcgtagcagaaggatttacactcgtttctggcggaacggacaaccatttattgctcattgacctccgttctatcggattaacaggaaaagtggctgaaaaagtgcttgatgagatcggtattacagtcaataaaaacacgattccatatgacccagaaagtccgtttgtcacaagcggcattcgcatcggtacagcggcggtaacaagccgtggcttcgggcttgaagaaatggatgaaattgcgcgcatcatttcgattgcgctcaaacataaagacgatgaacaaaagttagacgaagcgcgccgtcgcgttgctgcattaacggaaaagttcccattatacgtataa

SEQ ID NO: 10320 - protein, 413 aa, Anoxybacillus flavithermus WK1
MSMSRLSQQDPQVFQAIQDELKRQQTKIELIASENFVSEAVMEAQGSVLTNKYAEGYPGRRYYGGCEHVDVVEELARERAKQLFGAEHANVQPHSGAQANMAVYFTILQHGDTVLGMNLSHGGHLTHGSPVNFSGIQYNFIEYGVDPETHRINYDDVREKALKHKPKLIVAGASAYPRTIDFAKFREIADEVGAYFMVDMAHIAGLVAAGLHPNPVPYAHFVTTTTHKTLRGPRGGMILCQEQFAKQIDKAIFPGIQGGPLMHVIAAKAVALGEALQDDFKTYAQNIVNNAKRLAEALVAEGFTLVSGGTDNHLLLIDLRSIGLTGKVAEKVLDEIGITVNKNTIPYDPESPFVTSGIRIGTAAVTSRGFGLEEMDEIARIISIALKHKDDEQKLDEARRRVAALTEKFPLYV

SEQ ID NO: 10321 - DNA, 1275 bp, Thermosipho africanus TCF52B
  CDS (1)..(1275): transl_table=11
atgtgggaaaacgttaaaaagactgaccctgaaatatatgatgttatattaaaagaatgggaaagacaagaatacggacttgaacttattgcttcagaaaattttgcatcacttgctgtaattgaagcaatgggaagcgttttaactaataaatatgcagaaggatatcctggaagaagatactacggtggctgtgaatgggtagatgttgctgaaaagcttgcaagagatagagcaaaagaattgtttaacgtaaagtacgcaaatgttcaaccacattcaggctcacaagcaaatatgggagcatactttgccgtttccgaaccaggagatactataatgggaatgtcgttaagtcatggaggtcacctcacccatggtgcttctgtaaacttttctggaagaatatataacgtcgttccatacggtgtaaatcctgaaaccgaagtaatcgactatgatgaggttagagatcttgctttaaaacacaaaccaaagattatagtcgccggaggaagtgcctactcaagaataattgactttaaaaaattcagagaaatagcagatgaagttggagcatatctcatagtagatatggcacattttgctggtcttgttgcagcaggaatatacccaaatcctgcagaatatgctcacatagtaacaagtactactcacaaaacattgagaggtccaagaggtggtatgatattaaccaatgataacgagttgtacaaagcaataaataaatcaatattccctggaattcagggtggaccattgatgcacgtaattgctgcaaaagctgtttgtttcaaagaagcattaacagacgagtttaaagaataccaaaaacaagtagtaaagaacgcaaaaacacttgcagcagaacttgaaaaaagaggcttgagaattgtttcaggtggaacagacactcacctaatgctcgtggacctcaatccactaaatgttactggaaaggctgcagaaattgcacttggaaaatgccacattacagtaaacaaaaacacaattcctaatgaaacaagatctccatttattgcaagtggtataaggcttggaacaccagcacttacaacaagaggaatgaaggaatctgaaatggaagaaatagcagaacttattgtagatgtactaaaacatgtaaaagacgaagaaggaaatgtagatgaagaaatcgtcgaaaaaacacagaagaaagtaaaagatctctgcaccagattcccactttatgaaggaaaaatcaagttataa

SEQ ID NO: 10322 - protein, 424 aa, Thermosipho africanus TCF52B
MWENVKKTDPEIYDVILKEWERQEYGLELIASENFASLAVIEAMGSVLTNKYAEGYPGRRYYGGCEWVDVAEKLARDRAKELFNVKYANVQPHSGSQANMGAYFAVSEPGDTIMGMSLSHGGHLTHGASVNFSGRIYNVVPYGVNPETEVIDYDEVRDLALKHKPKIIVAGGSAYSRIIDFKKFREIADEVGAYLIVDMAHFAGLVAAGIYPNPAEYAHIVTSTTHKTLRGPRGGMILTNDNELYKAINKSIFPGIQGGPLMHVIAAKAVCFKEALTDEFKEYQKQVVKNAKTLAAELEKRGLRIVSGGTDTHLMLVDLNPLNVTGKAAEIALGKCHITVNKNTIPNETRSPFIASGIRLGTPALTTRGMKESEMEEIAELIVDVLKHVKDEEGNVDEEIVEKTQKKVKDLCTRFPLYEGKIKL

SEQ ID NO: 10323 - DNA, 1254 bp, Escherichia fergusonii ATCC 35469
  CDS (1)..(1254): transl_table=11
atgttaaagcgtgaaatgaacattgccgattatgatgccgaactgtggcaggctatggagcaggaaaaagtacgtcaggaagagcacatcgaactgatcgcctccgaaaactacaccagcccacgtgtaatgcaggcgcagggttctcagctgaccaacaaatatgctgaaggttatccgggcaaacgctactacggcggttgcgagtatgttgatatcgttgaacaactggcgatcgatcgcgcaaaagaactgttcggcgcagactacgctaacgttcagccgcactccggttcccaggctaactttgcggtctataccgcgctgctggaacccggtgataccgttctgggtatgaacctggcgcacggcggtcacctgactcacggctctccagttaacttctccggtaaactgtacaacatcgttccttacggtatcgatgctaccggccatatcgactacgctgatctggaaaaacaagccaaagaacacaaaccgaaaatgattatcggtggcttctctgcatactccggcgtggttgactgggcgaaaatgcgtgaaatcgctgacagcatcggtgcttacctgttcgttgatatggcgcacgttgcgggactggttgctgctggcgtctacccgaacccggttcctcatgctcacgtagtaactaccaccactcacaaaaccctggcgggtccgcgcggcggcctgatcctggcgaaaggcggtagcgaagatttgtacaaaaaactgaactctgctgtcttccctggtggtcagggtggtccgctgatgcacgtaatcgctggtaaagcggttgctctgaaagaagcaatggagcctgagttcaaaacttaccaacagcaggtcgcgaaaaacgctaaagcgatggtagaagtgttcctcgagcgcggctacaaagtggtttccggcggtactgataaccacctgttcctggtggatctggttgataaaaacctgaccggtaaagaagctgacgccgctctgggccgtgctaacatcaccgtcaacaaaaacagcgtaccaaacgatccgaagagcccgtttgtgacctccggtattcgtgtaggtactccggcgattacccgtcgcggctttaaagaagcagaagcgaaagaactggctggctggatgtgtgacgtgctggacagcatcaatgatgaagcggttattgagcgcatcaaaggtaaagttctcgacatctgcgcacgttacccggtttacgcgtaa

SEQ ID NO: 10324 - protein, 417 aa, Escherichia fergusonii ATCC 35469
MLKREMNIADYDAELWQAMEQEKVRQEEHIELIASENYTSPRVMQAQGSQLTNKYAEGYPGKRYYGGCEYVDIVEQLAIDRAKELFGADYANVQPHSGSQANFAVYTALLEPGDTVLGMNLAHGGHLTHGSPVNFSGKLYNIVPYGIDATGHIDYADLEKQAKEHKPKMIIGGFSAYSGVVDWAKMREIADSIGAYLFVDMAHVAGLVAAGVYPNPVPHAHVVTTTTHKTLAGPRGGLILAKGGSEDLYKKLNSAVFPGGQGGPLMHVIAGKAVALKEAMEPEFKTYQQQVAKNAKAMVEVFLERGYKVVSGGTDNHLFLVDLVDKNLTGKEADAALGRANITVNKNSVPNDPKSPFVTSGIRVGTPAITRRGFKEAEAKELAGWMCDVLDSINDEAVIERIKGKVLDICARYPVYA

SEQ ID NO: 10325 - DNA, 1254 bp, Escherichia coli UMN026
  CDS (1)..(1254): transl_table=11
atgttaaagcgtgaaatgaacattgccgattatgatgccgaactgtggcaggctatggagcaggaaaaagtacgtcaggaagagcacatcgaactgatcgcctccgaaaactacaccagcccgcgcgtaatgcaggcgcagggttctcagctgaccaacaaatatgctgaaggttatccgggcaaacgctactacggcggttgcgagtatgttgatatcgttgaacaactggcgatcgatcgtgcgaaagaactgttcggtgctgactacgctaacgtccagccgcactccggctcccaggctaactttgcggtgtacaccgcgctgctggaaccaggtgataccgttctgggtatgaacctggcgcatggcggtcacctgactcacggttctccggttaacttctccggtaaactgtacaacatcgttccttacggtatcgatgctagcggtcatatcgactacgccgatctggaaaaacaagccaaagaacacaaaccgaaaatgattatcggtggcttctctgcatattccggcgtggtggactgggcgaaaatgcgtgaaatcgctgacagcatcggtgcttacctgttcgttgatatggcgcacgttgcgggcctggttgcagctggcgtctacccgaacccggttcctcatgctcacgttgttactaccaccactcacaaaaccctggcgggtccgcgcggcggcctgatcctggcgaaaggtggtagcgaagagctgtacaaaaaactgaactctgccgttttccctggtggtcagggcggtccgttgatgcacgtaatcgccggtaaagcggttgctctgaaagaagcgatggagcctgagttcaaaacttaccagcagcaggtcgctaaaaacgctaaagcgatggtagaagtgttcctggaacgcggctacaaagtggtttccggcggcactgataaccacctgttcctggttgatctggttgataaaaacctgaccggtaaagaagcggacgccgctctgggccgtgctaacatcaccgttaacaaaaacagcgtaccgaacgatccgaagagcccgtttgtgacctccggtattcgcgtgggtactccggcgattacccgtcgtggctttaaagaagccgaagcgaaagaactggctggctggatgtgtgacgtgctggacagcatcaatgatgaagcggttattgagcgcatcaaaggtaaagttctcgacatctgcgcacgttacccggtttacgcataa

SEQ ID NO: 10326 - protein, 417 aa, Escherichia coli UMN026
MLKREMNIADYDAELWQAMEQEKVRQEEHIELIASENYTSPRVMQAQGSQLTNKYAEGYPGKRYYGGCEYVDIVEQLAIDRAKELFGADYANVQPHSGSQANFAVYTALLEPGDTVLGMNLAHGGHLTHGSPVNFSGKLYNIVPYGIDASGHIDYADLEKQAKEHKPKMIIGGFSAYSGVVDWAKMREIADSIGAYLFVDMAHVAGLVAAGVYPNPVPHAHVVTTTTHKTLAGPRGGLILAKGGSEELYKKLNSAVFPGGQGGPLMHVIAGKAVALKEAMEPEFKTYQQQVAKNAKAMVEVFLERGYKVVSGGTDNHLFLVDLVDKNLTGKEADAALGRANITVNKNSVPNDPKSPFVTSGIRVGTPAITRRGFKEAEAKELAGWMCDVLDSINDEAVIERIKGKVLDICARYPVYA

SEQ ID NO: 10327 - DNA, 1281 bp, Thermomicrobium roseum DSM 5159
  CDS (1)..(1281): transl_table=11
atggacgagcgattgtgggagtgggatttcgaggtcgccgaagcgatcgcgtgcgaggagcggcggcaaagccggacgatcgagctgatcgcatcggagaacttcaccagtccggcggtcctggcggcggttggttccgtgctgaccaataaatatgcggaagggtatcctggacggcgctattatggcggatgcgagtgtgtcgatcgtgtggaggaactcgcgatccagcgcgcgaagcagttgttcggtgcgccacacgtcaatgttcagcctcattcgggcgcacaggcgaacatggctgcttactttgccgttttgcagccaggtgaccggatcctcgggatgagcctgcagcatggcggtcatctgacgcatggcgcgaaggtcaatctctcaggtcgatggttcgaggtggctttctacggggtcgatccggagaccgagcggatcgattatgacgcggtttggcatatcgcgcgcgaaatacgacccaagctgatcatttccggagcgagtgcgtatccgcgagtgatcgactttgcacggttgcgcgagatcgccgacgacgtgggagcgatcctgatggccgacatcgcgcacatcgccggtctcgtggcggttggcttgcatccgtctcccatcggtgtcgcccagctcgtcacgaccacgacgcacaagacgctgcggggatcacgtgggggaatgatcatgtgcgatgcggaattcgctgaagcagtcgacaaggcggtgttccccggaacacagggcgggccgctcatgcatgtcattgctgggaaagcggtcgccttgggcgaggctttgcgcccgacgttccggacctacatcgagcgcgtgctggagaatgcgcgggtgttggcggaaacgttgcaggcggaagggttccgcctcgtttcgggagggaccgacaatcatctcctgctggtcgaccttcgctcgcatggactctctggtcggaaggccgaacgggtgctagacgaagtgggtatcaccgtcaacaaaaacacgatcccgaacgacccgaaaccgccgacgcaagccagtggtatcaggctggggacgccagcgatgacgacgcgtggtttcggcccggacgagatgcgcctgactgcccgctggatcgccgacgtgttgcgtgcacctgacgacgaatcggtcaaggcgcgagtgcgtgctgaagtcgccgagctggtttcccgattcccggttcccggcgttaccatagaagcacgaactggcgtcgatgatggtactgtttga

SEQ ID NO: 10328 - protein, 426 aa, Thermomicrobium roseum DSM 5159
MDERLWEWDFEVAEAIACEERRQSRTIELIASENFTSPAVLAAVGSVLTNKYAEGYPGRRYYGGCECVDRVEELAIQRAKQLFGAPHVNVQPHSGAQANMAAYFAVLQPGDRILGMSLQHGGHLTHGAKVNLSGRWFEVAFYGVDPETERIDYDAVWHIAREIRPKLIISGASAYPRVIDFARLREIADDVGAILMADIAHIAGLVAVGLHPSPIGVAQLVTTTTHKTLRGSRGGMIMCDAEFAEAVDKAVFPGTQGGPLMHVIAGKAVALGEALRPTFRTYIERVLENARVLAETLQAEGFRLVSGGTDNHLLLVDLRSHGLSGRKAERVLDEVGITVNKNTIPNDPKPPTQASGIRLGTPAMTTRGFGPDEMRLTARWIADVLRAPDDESVKARVRAEVAELVSRFPVPGVTIEARTGVDDGTV

SEQ ID NO: 10329 - DNA, 1248 bp, Anaerocellum thermophilum DSM 6725
  CDS (1)..(1248): transl_table=11
atgtatttttacaatttagtaaaaaatacagatccagaaatagctgaggcaataaagagcgagcttaaaagacagcagaataaaattgagcttattgcatctgagaactttgtttcaattgcagtaatggcagcaatgggttcacctttgacaaataaatatgcagaaggatatccaggaaagagatattatggtggatgcgaatatatcgatgttgttgaatctatagcaattgagagagctaaaaagctgtttggagctgaacatgctaatgtccagccgcactcaggtgcacaggcgaacatggctgtgtattttgcagtattaaatccgggcgatactatccttggaatgaatctttcgcatggtggacatctgactcatggcagccctgtgaacttttcagggaagctttacaatattatttcatatggggttgaccctgaaacagagacaataaattatgatgaagttttaaaacttgcaaaggagcacagaccaaaacttatcttggcaggcgcatcggcgtatccgagagtaatagattttaaaaagttcagagagatagctgatgaagtgggagcttatttgatggtagatatggctcacattgctgggcttgttgctgcaggacttcatccatcacctgttgaatatgctgattttgttacaaccacaacacacaaaacgctcagaggtccacgcggtggtcttattctttgcaaagaaaagtatgcaaaattaattgacaagtccattttccctggaatacaaggtggcccgcttgaacatgtaatagctgcaaaagctgttgctctcaaagaagctatgacagaagagttcaaaaactaccaggttcaaatattgaaaaatgcaaaagctctgagtacaagacttattgaaagaggattcagacttgtgagtggtggaactgataatcatttaatgttagtagatttgagaaataaaggtataacaggaaaagacgccgaaaagatattggatgagcataatataacatgtaacaaaaatgcggttccttttgatactcaaagtccgatgataacaagcgggataagacttgggacgccggctgtcacaaccagagggtttaaagaaggggatatgcttgaggttgcagatattatccatgatgctttgacaaattctgatactaaagagaatattttaatcagagtgaaagctctttgcgaaaaacatcctttgtataaagaatttgatgaataa

SEQ ID NO: 10330 - protein, 415 aa, Anaerocellum thermophilum DSM 6725
MYFYNLVKNTDPEIAEAIKSELKRQQNKIELIASENFVSIAVMAAMGSPLTNKYAEGYPGKRYYGGCEYIDVVESIAIERAKKLFGAEHANVQPHSGAQANMAVYFAVLNPGDTILGMNLSHGGHLTHGSPVNFSGKLYNIISYGVDPETETINYDEVLKLAKEHRPKLILAGASAYPRVIDFKKFREIADEVGAYLMVDMAHIAGLVAAGLHPSPVEYADFVTTTTHKTLRGPRGGLILCKEKYAKLIDKSIFPGIQGGPLEHVIAAKAVALKEAMTEEFKNYQVQILKNAKALSTRLIERGFRLVSGGTDNHLMLVDLRNKGITGKDAEKILDEHNITCNKNAVPFDTQSPMITSGIRLGTPAVTTRGFKEGDMLEVADIIHDALTNSDTKENILIRVKALCEKHPLYKEFDE

SEQ ID NO: 10331 - DNA, 1272 bp, Thermus thermophilus HB27
  CDS (1)..(1272): transl_table=11
ttgcgccttctccctcatgccgcgattttacccggctataatcgccctatggtgagcaccctcaagcgggacgaggccctctttgagctcatcgccttagaggagaaaaggcagcgggaaggcctggagctcatcgccagcgaaaacttcgtctccaagcaggtgcgggaggcggtggggagcgtcctcaccaacaagtacgccgagggctaccccggggcccggtactacggggggtgcgaggccattgaccgggtggagtccctggccatagagcgggccaaggccctcttcggagcggcctgggccaacgtccagccccactccggctcccaggccaacatggcggtctacatggccctgatggagccgggggacaccctcatgggcatggacctcgcggccggcggccacctcacccacggctcccgcgtgaacttctccgggaagctttacaaggtggtctcctacggggtccgtcccgacacggagctcatagacctggaggaggtccgccgcctcgccctcgagcaccgccccaaggtgatcgtggccggggccagcgcctacccccgcttctgggactttaaggcctttcgggagatcgccgacgaggtgggggcctacctcgtggtggacatggcccacttcgccgggctcgtggccgcgggcctccacccgaaccccctgccttacgcccacgtggtgacgagcaccacccacaaaaccctccggggcccgaggggcggcctcatcctctccaacgaccctgagctcggcaagaggattgacaagctcatcttccccgggatccagggggggcccttggagcacgtgatcgccgggaaggccgtggccttctttgaggccctacagcccgagttcaaggagtacagccgcctggtggtggaaaacgccaagcgcctggcggaggcgcttgcccgccggggctaccgcatcgtcaccggggggacggacaaccacctcttcctcgtggacctgcgccccaagggcctcaccgggaaggaggcagaggagaggctggacgccgtggggatcacggtgaacaagaacgccatcccctttgaccccaagcccccccgggtcacctcggggatccgcatcggcaccccggccatcaccacccggggcttcacccccgaggagatgcccctcgtcgccgagctcatagaccgggcccttctggagggcccctcggaggccctgcgggaagaggtgcgcaggctcgccctggcccaccccatgccctga

SEQ ID NO: 10332 - protein, 423 aa, Thermus thermophilus HB27
MRLLPHAAILPGYNRPMVSTLKRDEALFELIALEEKRQREGLELIASENFVSKQVREAVGSVLTNKYAEGYPGARYYGGCEAIDRVESLAIERAKALFGAAWANVQPHSGSQANMAVYMALMEPGDTLMGMDLAAGGHLTHGSRVNFSGKLYKVVSYGVRPDTELIDLEEVRRLALEHRPKVIVAGASAYPRFWDFKAFREIADEVGAYLVVDMAHFAGLVAAGLHPNPLPYAHVVTSTTHKTLRGPRGGLILSNDPELGKRIDKLIFPGIQGGPLEHVIAGKAVAFFEALQPEFKEYSRLVVENAKRLAEALARRGYRIVTGGTDNHLFLVDLRPKGLTGKEAEERLDAVGITVNKNAIPFDPKPPRVTSGIRIGTPAITTRGFTPEEMPLVAELIDRALLEGPSEALREEVRRLALAHPMP

SEQ ID NO: 10333 - DNA, 1242 bp, Listeria monocytogenes str. 4b F2365
  CDS (1)..(1242): transl_table=11
atggtctatttacaaaagcaagataaggaagtttttgatgcaattaagttagagcttggtagacaacgcgcgaatatcgaattaatcgcatctgagaattttgttagtgagcaagtaatggaagctatgggatctgtattaacgaataaatatgcagaaggttacccagggaaacgctattacggcggatgtgaattcgtggatattgtggaagatttagcacgcgaccgcgcgaaaaaattatttggcgctgaatatgcgaatgtccaaccacactcaggtgctcaagcgaatatggcagtttatcatacagtgcttgaaccaggcgatactgttcttggtatgaacctttcacatggtgggcatttaacacatggtagcccagtaaatttcagcggtgttttatacaattttgttgaatacggcgttcgtgaagatacgaaagaaattgattacgatattgttcgtgaagcagctttaaaacataaaccaaaaatgattgtagctggcgcaagtgcttatccacgtaaaattgattttgctaaattccgcgaaattgctgatgaagttggcgcatacttaatggtagatatggcgcatattgctggtcttgttgctgctggcttgcatcaaaatccagttccttatgctgattttacaacgacaactacccataaaacgcttcgtggacctcgcggcggaatgattttagccaaagcagaatgggaacaaaaattaaataaatcgattttcccaggaatccaaggtggaccgttaatgcacgtaatcgcagcgaaagcagtggcgtttggtgaagcgttacaacctgaattcacggcgtactgtgaacaaattattcgtaactctaaaaaattagcagaaacacttcaagcgaatgatgttgctgttttaacaggtggttcggataatcatttattattaattgatttaaaaccacttggcttaacaggaaaagcagcggagaaagtattagatgaagttggtattaccgtgaataaaaataccattccattcgaaacggaaagcccatttgtcacaagtggtatccgtgtaggtgttgctgcagtgaccactcgtggatttgatgaagttgcgattgaaaaagttggtgtacttatttcagaagtactgcataatttagaaaatgaagaagttctcgcagatgtaaaagcacgcgtggctactttaacaaatgaatatccgctttatccaagtttataa

SEQ ID NO: 10334 - protein, 413 aa, Listeria monocytogenes str. 4b F2365
MVYLQKQDKEVFDAIKLELGRQRANIELIASENFVSEQVMEAMGSVLTNKYAEGYPGKRYYGGCEFVDIVEDLARDRAKKLFGAEYANVQPHSGAQANMAVYHTVLEPGDTVLGMNLSHGGHLTHGSPVNFSGVLYNFVEYGVREDTKEIDYDIVREAALKHKPKMIVAGASAYPRKIDFAKFREIADEVGAYLMVDMAHIAGLVAAGLHQNPVPYADFTTTTTHKTLRGPRGGMILAKAEWEQKLNKSIFPGIQGGPLMHVIAAKAVAFGEALQPEFTAYCEQIIRNSKKLAETLQANDVAVLTGGSDNHLLLIDLKPLGLTGKAAEKVLDEVGITVNKNTIPFETESPFVTSGIRVGVAAVTTRGFDEVAIEKVGVLISEVLHNLENEEVLADVKARVATLTNEYPLYPSL

SEQ ID NO: 10335 - DNA, 1254 bp, Pectobacterium atrosepticum SCRI1043
  CDS (1)..(1254): transl_table=11
atgttaaagcgtgaaatgaacattgccgattatgatgccgacctgtggcaagcaatggagcaagaagtggtgcgtcaggaagagcatattgaactgattgcgtcagaaaactacaccagcccacgcgtgatgcaggctcaaggttctcagctgacgaacaagtatgctgaaggctatccgggcaaacgttactacggcggctgtgagtatgttgacatcgttgagcaactggcgatcgatcgtgcgaaagcgctgttcggtgcagattatgccaacgtgcagccgcactccggctctcaggctaacttcgccgtttacaccgcgctgctgcagccgggcgacaccattctgggtatgaacctggcgcacggtggtcacctgacgcatggttctccggttaacctgtccggtaaactgtataaagtcatcccttacggcatcgacgaaagcggtaaaatcgactacgacgaaatggctgaactggcgcgtacgcaccagccaaaaatgattgtcggcggtttctctgcctactctggcgtggttgactgggcgaaaatgcgtgaaatcgctgacagcatcggtgcttatctgtttgtcgatatggcgcacgttgcgggtctgattgccgcagatgtttaccctaacccggttcctcatgctcatatcgtgaccacgactacgcacaaaacgcttgctggcccacgcggtggcctgattctggcgaaaggcggcgacgaagatctgtataaaaagctgaactccgctgttttccctggcggtcagggtggcccgttgatgcacgttatcgcgggtaaagcggttgcactgaaagaagcgatggaacctgagttcaaagtctatcagcagcaggttgcgaaaaacgccaaagcaatggtagaagtcttcctgtcacgtggcttcaacgtggtttctggtgctaccagtaaccatctgttcctgctggatctggtcagcaaaaacctgacgggtaaagaagccgatgcagcactgggtcgtgcgaacattaccgtgaacaaaaacagcgtgcctaacgatccgaagagcccgttcgtgacttccggtatccgtatcggtacgccagcggcaacgcgtcgtggctttaaagaagcggaagtgcgtgaactggctggctggatctgtgatgtgttggacaacatcaacgacgaagcgaccattgaacgcgtgaagcaaaaagttctggatatctgcgcccgtttcccggtttacgcataa

SEQ ID NO: 10336 - protein, 417 aa, Pectobacterium atrosepticum SCRI1043
MLKREMNIADYDADLWQAMEQEVVRQEEHIELIASENYTSPRVMQAQGSQLTNKYAEGYPGKRYYGGCEYVDIVEQLAIDRAKALFGADYANVQPHSGSQANFAVYTALLQPGDTILGMNLAHGGHLTHGSPVNLSGKLYKVIPYGIDESGKIDYDEMAELARTHQPKMIVGGFSAYSGVVDWAKMREIADSIGAYLFVDMAHVAGLIAADVYPNPVPHAHIVTTTTHKTLAGPRGGLILAKGGDEDLYKKLNSAVFPGGQGGPLMHVIAGKAVALKEAMEPEFKVYQQQVAKNAKAMVEVFLSRGFNVVSGATSNHLFLLDLVSKNLTGKEADAALGRANITVNKNSVPNDPKSPFVTSGIRIGTPAATRRGFKEAEVRELAGWICDVLDNINDEATIERVKQKVLDICARFPVYA

SEQ ID NO: 10337 - DNA, 1272 bp, Pectobacterium atrosepticum SCRI1043
  CDS (1)..(1272): transl_table=11
atgtatgacacctctttgactcttaccgagttcgaccccgaattagccgatgctatcctgcatgaagaagaccgtcaggaaacccacgttgaactcatcgcttcagagaactatgccagtccgctggtgatggcgatccagaattctgtgttcaccaacaaatatgcagaaggttacctcggcaagcgctattacagcggctgcgagtatgttgacgtagccgaacgccttgctatcgagcgagccaaagtgctgtttgactgcgattacgctaacgtccagccccatgctggtgctcaggcgaatgcggccgtgtttctggcattgactaacccaggcgacaccgtgatgggcatgaatctggctcagggcgggcatttgacccacggtaacccttccaacttctctggtcgccactacaagatcgtgccttatgggcttgattctgaaacagggcttatcgattacgacgaaatggaacgtattgccttggaaactcggccaaagatgctaataggagggttctctgcctattcacgccataaggactgggcgcgtatgcgcactattgctgacaaagtgggagctatcttctgggtggatatggctcatgttgccggtttagtggcggcgggtgaatacccgaacccgctccctcaggcgcatgttgtaaccagtacaacgcataagaccctgcgcggcccgcgcggtggcattattttggccaagggacagagtgaggatttttacaaaaagctcaatgccgccgtgttccccggtattcagggtggcccgctgatgcacgttattgcggccaaagcggtggccttcaaggaagcgctacgccctgagttcacggtttatcagcgtcaggtggtggccaatgctcgagcaatggcgcgcattatccagcagcgtggttacaagatcgtctccgacggcactgacaaccatttgctgctgatcgacctgtccgctaagccgtataccggtaaggatgccgacgccgcgctgagtgatgcttatatcacgacaaataagaattcggtgcctaacgacccgcgttcaccttttgttacctcaggactgcgtattggtacgccagccgtgacgacacgtggtttcggtgtgacagagtgcgagcaactggcggggtggctatgtgatgtgctggatgggctgggtgccgggaatgaagaattaacggtgatacgcgatcgtgttcgcgagcaggtagtagcactgtgccaccgttatcctgtgtatcaataa

SEQ ID NO: 10338 - protein, 423 aa, Pectobacterium atrosepticum SCRI1043
MYDTSLTLTEFDPELADAILHEEDRQETHVELIASENYASPLVMAIQNSVFTNKYAEGYLGKRYYSGCEYVDVAERLAIERAKVLFDCDYANVQPHAGAQANAAVFLALTNPGDTVMGMNLAQGGHLTHGNPSNFSGRHYKIVPYGLDSETGLIDYDEMERIALETRPKMLIGGFSAYSRHKDWARMRTIADKVGAIFWVDMAHVAGLVAAGEYPNPLPQAHVVTSTTHKTLRGPRGGIILAKGQSEDFYKKLNAAVFPGIQGGPLMHVIAAKAVAFKEALRPEFTVYQRQVVANARAMARIIQQRGYKIVSDGTDNHLLLIDLSAKPYTGKDADAALSDAYITTNKNSVPNDPRSPFVTSGLRIGTPAVTTRGFGVTECEQLAGWLCDVLDGLGAGNEELTVIRDRVREQVVALCHRYPVYQ

SEQ ID NO: 10339 - DNA, 1239 bp, Symbiobacterium thermophilum IAM 14863
  CDS (1)..(1239): transl_table=11
atggatgcactgaagcggtatgatcccgaggtcttcgcggccattcagcaggaggtcgagcggcagcagcgcaacattgagctgatcgcctcggagaacttcgtgcccaaggcggtcctcgaggcggcgggcacggtgctcaccaacaagtacgccgagggctatcccggccggcggtactacggcggctgcgagtacgtggacatcgtggagaacatcgcccgggagcggctgaaggcggccttcggcgcggagcacgtcaacgtccagccgcactcgggggccaacgccaacacggcggtctacttcgccttcctccagcccggcgatacggtgctgggcatgaacctggcccagggcggccacctgacccacggctcgccggtcaacttcagcggcaggacttacaacttcgtgccctacggcctggacccggagaccgagcggatcaacatggaccaggtggcggagctggcccggcagcaccggcccaagctcatcgtcgccggctactcggcctacccgcgggtcctggacttcaagcggttccgggagatcgccgaagaggtgggcgccatcctgatggtggacatggcccacttcgccggcctggcggccacgggctactacccgaacccggtggagcacgcgcacgtggtcaccaccaccacccacaagacgctgcgcgggccgcggggcggggcgatcctctgcaagaaggagttcgccaaggagatcgacaaggcggtcttcccgggcatgcagggcggccccctgatgcacatcatcgccgccaaggcggtggccttcaagcagctctccgacccggactacagggcatactgcggccaggtggtgaagaacgccaaggccctggcccaggcgctgctggagcggggctaccggctggtcaccggcggcaccgacaaccacctgatgctggtggacctgcggcccaagggcatcaccggccgggacgcggagcacctgctggacagggtctcgatcacggtcaacaagaacgccatccccaacgaccccgagaagccgatggtgaccagcggcatccgcatcggcaccccggccatgaccacccgggggatgaaggaggccgagatggtccagatcgccgacctcatcgaccgggccatcacccaccggaacgacgaggcggagctggaccggatccgggcggaggtgcacgagctcacggcccggttcccgctctacgccgactag

SEQ ID NO: 10340 - protein, 412 aa, Symbiobacterium thermophilum IAM 14863
MDALKRYDPEVFAAIQQEVERQQRNIELIASENFVPKAVLEAAGTVLTNKYAEGYPGRRYYGGCEYVDIVENIARERLKAAFGAEHVNVQPHSGANANTAVYFAFLQPGDTVLGMNLAQGGHLTHGSPVNFSGRTYNFVPYGLDPETERINMDQVAELARQHRPKLIVAGYSAYPRVLDFKRFREIAEEVGAILMVDMAHFAGLAATGYYPNPVEHAHVVTTTTHKTLRGPRGGAILCKKEFAKEIDKAVFPGMQGGPLMHIIAAKAVAFKQLSDPDYRAYCGQVVKNAKALAQALLERGYRLVTGGTDNHLMLVDLRPKGITGRDAEHLLDRVSITVNKNAIPNDPEKPMVTSGIRIGTPAMTTRGMKEAEMVQIADLIDRAITHRNDEAELDRIRAEVHELTARFPLYAD

SEQ ID NO: 10341 - DNA, 1254 bp, Legionella pneumophila subsp. pneumophila str. Philadelphia 1
  CDS (1)..(1254): transl_table=11
atgtttgacgaaagttatagtataaaaaattttgatgatgttctttttaaagcaatttctgatgaaaaacgacgccaagaagaacacattgaattaatagcatctgaaaattatgtcagcccgagagtattggaggctcagggttctgtgttgacgaataaatacgctgaaggatatccaggcaaacgctattacggaggttgtgagtttgttgatgtcgctgaggagttagccatttcaagggcaaaattactttttggcgctcattatgtcaatgtgcaaccgcattcgggatcacaagcgaacgcagcagtcatgatggcattattgtccccaggcgatacttttatgggcatggctttacctcatggtgggcacttgactcatgggtcaaaggttaatttttcaggtaaattataccattctgtcgagtatggtgttgatagcaatacgggtttgattgattatgatgctctggaaaaacttgcgcttcaacacaaaccaaaattgatcattgccggtttttcagcttattccaggatcctggattgggctcgatttagagaaattgccgataaggtcggcgcttatttaatggcggacatcgctcatgtagctggtctggtggctgtagggttatatccttctcctgttccttatgcggatgttgtgacaacgacaactcataaaactttaagaggacctcgcggtggtttaatcctttgtaaggaaaacgaagaaattgagaaaaaattaaattcttctgtatttcctggtatgcaaggtgggcccttaatgcatgtaattgcagccaaggcagttgcttttgcagaagctctgttacccgaattcaaaacttatcagcaacaggttttagctaatgccagaacgatgtgcagtgtgttacaaagcagaggctatgatattgtttctggcggaactgataatcatcttttgctagtggatttgataaataaaggaattacaggtaaagaagctgacgctgctgtaggcagagctaacataacagtcaataaaaattcggttcccaatgatcctcgctcgccttttgtaacgagtggtttacgtttgggtacgcctgctgcaaccacaagaggctttaaagaaagagagattactttgttatctaactgggtagcggatgtccttgataatgttcatgatgaaactaatatttcaagagtgaaaacccaggtgttgctactctgtcgtgaatttccggtttatgcctaa

SEQ ID NO: 10342 - protein, 417 aa, Legionella pneumophila subsp. pneumophila str. Philadelphia 1
MFDESYSIKNFDDVLFKAISDEKRRQEEHIELIASENYVSPRVLEAQGSVLTNKYAEGYPGKRYYGGCEFVDVAEELAISRAKLLFGAHYVNVQPHSGSQANAAVMMALLSPGDTFMGMALPHGGHLTHGSKVNFSGKLYHSVEYGVDSNTGLIDYDALEKLALQHKPKLIIAGFSAYSRILDWARFREIADKVGAYLMADIAHVAGLVAVGLYPSPVPYADVVTTTTHKTLRGPRGGLILCKENEEIEKKLNSSVFPGMQGGPLMHVIAAKAVAFAEALLPEFKTYQQQVLANARTMCSVLQSRGYDIVSGGTDNHLLLVDLINKGITGKEADAAVGRANITVNKNSVPNDPRSPFVTSGLRLGTPAATTRGFKEREITLLSNWVADVLDNVHDETNISRVKTQVLLLCREFPVYA

SEQ ID NO: 10343 - DNA, 1281 bp, Bacteroides fragilis YCH46
  CDS (1)..(1281): transl_table=11
atgaaaagagacgatttaattttcgatattatcgaaaaagaacatcaacgtcagttgaaaggcattgagctgatcgcatcagaaaatttcgtaagtgatcaggtgatggaggcaatgggatcttgtcttaccaataaatatgcggaaggatatccgggtaaacgctactatggtggctgtgaagtggtagaccaaagcgaacaaattgccattgaccgcctgaaagagatttttggtgcagaatgggccaatgtgcaaccccactcaggagcacaggctaatgcagccgtatttctggctgtactgaatccgggagataaattcatggggctgaatctggcacatggaggacacctttcacatggttcattagtaaacacttcgggaatcatttatactccctgcgaatataatctgaaacaggaaactgggcgcgtagattacgatcaaatggaggaagtagcattgcgtgaaaagcccaaaatgatcattggaggcggttcggcctactctcgtgaatgggattataaacgtatgcgcgaaattgccgacaaggtaggagcaattctcatgatcgacatggcacatcctgctgggttaattgcagccggtctattggataatcctgtgaaatatgcacatattgtgacttcaaccactcataagaccctccgaggacctcgtggtggcgtaatcatgatgggaaaagactttcctaatccttggggaaagaaaactccgaaaggagaaattaagatgatgtctcaactacttgactcagctgtattcccaggaatacaaggagggccgttggaacatgtgattgcagccaaagctgtagctttcggtgaatgtttgcaacccgaatataaagaatatcaaaaacaggtacaaaagaatgccgctgtattagcacaagccttgattgaccgtggtttcactattgtttcaggtggcacagataatcattccatgctggttgacttgcgtagtaaataccctactctaacaggtaaggttgcagaaaaagcactcgtatctgctgatataacagttaataaaaatatggttccgtttgatagtcgttccgcattccagacttcaggtatccgtttgggtactcctgccatcacaacacgtggtgcaaaagaagatctgatgttggaaatcgcggaaatgatcgaaaccgtattatctaacgtagaaaatgaagaagtgatagcacaagtacgtgcacgtgtcaacaagacaatggaaaaatatccgatcttcgcatattaa

SEQ ID NO: 10344 - protein, 426 aa, Bacteroides fragilis YCH46
MKRDDLIFDIIEKEHQRQLKGIELIASENFVSDQVMEAMGSCLTNKYAEGYPGKRYYGGCEVVDQSEQIAIDRLKEIFGAEWANVQPHSGAQANAAVFLAVLNPGDKFMGLNLAHGGHLSHGSLVNTSGIIYTPCEYNLKQETGRVDYDQMEEVALREKPKMIIGGGSAYSREWDYKRMREIADKVGAILMIDMAHPAGLIAAGLLDNPVKYAHIVTSTTHKTLRGPRGGVIMMGKDFPNPWGKKTPKGEIKMMSQLLDSAVFPGIQGGPLEHVIAAKAVAFGECLQPEYKEYQKQVQKNAAVLAQALIDRGFTIVSGGTDNHSMLVDLRSKYPTLTGKVAEKALVSADITVNKNMVPFDSRSAFQTSGIRLGTPAITTRGAKEDLMLEIAEMIETVLSNVENEEVIAQVRARVNKTMEKYPIFAY

SEQ ID NO: 10345 - DNA, 1248 bp, Burkholderia pseudomallei K96243
  CDS (1)..(1248): transl_table=11
atgtttgacagagcccaaagcaccattgcgaacgtcgatcccgagatctggcaagcgattcagcaggaaaacgtccgtcaggaagagcacatcgagctgatcgcgtcggagaattacacgagcccggccgtgatggcggcgcaaggctcgcaactgacgaacaagtacgcggaaggctatccgggcaagcgctattacggcggctgcgaatacgtggacatcgtcgagcagctcgcgatcgatcgcgtgaaggcgctgttcggcgccgaagcggcgaacgtgcagccgaactcgggctcgcaggcgaaccagggcgtgttcttcgcgatgctcaagccgggcgacacgatcatgggcatgagcctcgcgcacggcggccacctcacgcacggctcgccggtgaacatgtcgggcaagtggttcaacgtcgtgagctacgggctgaacgaggctgaagacatcgattacgaagcggccgagcagctcgcgcacgagcacaagccgaagctgatcgtcgcgggcgcgtcggcgttcgcgctgaagatcgatttcgagcgcctcgcgaagatcgccaaggcagtgggcgcgtacctgatggtcgacatggcgcactacgcgggcctgatcgcggcgggtgtctatccgaacccggtgccgcatgcggatttcgtcacgacgacgacgcacaagagcctgcgcggcccgcgcggcggcgtgatcctgatgaaggccgagtacgagaagcagatcaactcggcgatcttcccgggcatccagggcggaccgctgatgcacgtgatcgccgcgaaggccgtcgcgttcaaggaagcgctgtcgccggaattcaaggaataccagcagaaggtggtcgagaacgcccgcgtgctggcgcaaacgctcgtcaagcgcggcctgcgcatcgtgtcgggccgcaccgagagccatgtgatgctggtcgacctgcgcgcgaagaacatcacgggcaaggcggcggaagcggcgcttggcaatgcgcacatcacggtcaacaagaacgcgatcccgaacgatccggagaagcccttcgtgacgagcggcgtgcgcctgggctcgccggcgatgacgacgcgcggcttcggcccgcaggaagcggagctcgtcggcaacctgatcgccgacgtgctcgagcatcccgaagacgcggcgacgatcgagcgcgtgcgtgcgcaggtcgccgagctgacgaagcgtttcccggtctatcgctga

SEQ ID NO: 10346 - protein, 415 aa, Burkholderia pseudomallei K96243
MFDRAQSTIANVDPEIWQAIQQENVRQEEHIELIASENYTSPAVMAAQGSQLTNKYAEGYPGKRYYGGCEYVDIVEQLAIDRVKALFGAEAANVQPNSGSQANQGVFFAMLKPGDTIMGMSLAHGGHLTHGSPVNMSGKWFNVVSYGLNEAEDIDYEAAEQLAHEHKPKLIVAGASAFALKIDFERLAKIAKAVGAYLMVDMAHYAGLIAAGVYPNPVPHADFVTTTTHKSLRGPRGGVILMKAEYEKQINSAIFPGIQGGPLMHVIAAKAVAFKEALSPEFKEYQQKVVENARVLAQTLVKRGLRIVSGRTESHVMLVDLRAKNITGKAAEAALGNAHITVNKNAIPNDPEKPFVTSGVRLGSPAMTTRGFGPQEAELVGNLIADVLEHPEDAATIERVRAQVAELTKRFPVYR

SEQ ID NO: 10347 - DNA, 1254 bp, Legionella pneumophila str. Lens
  CDS (1)..(1254): transl_table=11
atgtttgacgaaagttatactataaaaaattttgatgatgttctttttaaagcaatttctgatgaaaaacgacgtcaagaagaacacattgaattaatagcatctgaaaattatgtcagcccgagagtattggaagctcagggttctgtgttgacgaataaatacgctgaaggatatccaggcaaacgctattacggaggttgtgagtttgttgatgtcgctgaagagttagccatttcaagggcaaaattactttttggcgctcattatgtcaatgtgcaaccccactcgggatcacaagcaaacgcagcagtcatgatggcattattgtccccaggcgatacttttatgggtatggctttacctcatggcggacacttgactcatgggtcaaaggttaatttttcaggtaaattataccattctgtcgagtatggtgttgataacaatacgggtttgattgattatgatgctctggagaaacttgcgcttcaacacaaaccaaaattgatcattgccggtttttcagcttattccaggatcctggattgggctcggtttagagaaattgccgataaggtcggcgcttatttaatggcggacatcgctcatgtagctggtctggtggccgtagggttatatccttctcctgttccttatgcggatgttgtgacgacaacaactcataaaactttaagaggacctcgcggtggtttaatcctttgtaaggaaaacgaagaaattgagaaaaaattaaattctgctgtatttcctggtatgcaaggtggccccttaatgcatgtaattgctgccaaggcggttgcttttgcggaagcgctgttacccgaattcaaaacttatcagcaacaggttttagctaatgccagaacgatgtgcagtgtgttacaaagcagaggctatgatattgtttctggcggaacggataaccatcttttgctagtggatttgataaataaaggaattacaggtaaagaagctgacgctgctttaggcagagccaacataacagtcaataaaaattcggttcccaatgatcctcgctcaccttttgtaacgagtggtttacgtttgggtacacctgctgcaaccacaagaggctttaaagaaagagagattactttgttatctaactgggtagctgatgtccttgataatgttcatgatgaaactaatatttcaagagtgaaaacccaggtgctgctactctgtcgtgaatttccggtttatgcctaa

SEQ ID NO: 10348 - protein, 417 aa, Legionella pneumophila str. Lens
MFDESYTIKNFDDVLFKAISDEKRRQEEHIELIASENYVSPRVLEAQGSVLTNKYAEGYPGKRYYGGCEFVDVAEELAISRAKLLFGAHYVNVQPHSGSQANAAVMMALLSPGDTFMGMALPHGGHLTHGSKVNFSGKLYHSVEYGVDNNTGLIDYDALEKLALQHKPKLIIAGFSAYSRILDWARFREIADKVGAYLMADIAHVAGLVAVGLYPSPVPYADVVTTTTHKTLRGPRGGLILCKENEEIEKKLNSAVFPGMQGGPLMHVIAAKAVAFAEALLPEFKTYQQQVLANARTMCSVLQSRGYDIVSGGTDNHLLLVDLINKGITGKEADAALGRANITVNKNSVPNDPRSPFVTSGLRLGTPAATTRGFKEREITLLSNWVADVLDNVHDETNISRVKTQVLLLCREFPVYA

SEQ ID NO: 10349 - DNA, 1251 bp, Photobacterium profundum SS9
  CDS (1)..(1251): transl_table=11
atgctaaagcgcgatatgaatattgccgactatgatgcggaactttttgcagccattcaggaagaaacagcacgtcaagaagagcacatcgagttgatcgcttctgaaaactacacaagcccacgtgtaatggaagctcaaggatctcagctgactaacaaatatgctgaaggttacccaggtaagcgttattacggtggttgtgagtttgttgataaagcagaacaactagcgattgatcgtgcatgtcagctttttggtgctgaatacgcgaacgtacagcctcattctggttctcaagctaacaacgccgtttacatggcactactaaatccaggcgacactgtattaggtatgagccttgctcacggtggtcacttgactcacggttctccagtaaacttttctggtaagttatacaacatcatcccttacggcatcgatgaaactggtcagatcgattacgaagaaatggaagcattggcgttagagcacaaacctaagatgattatcggtggtttctctgcgtactctcaggttgttgactggaaacgcatgcgtgaaatcgctgataaagtgggcgcatacttcttcgttgatatggctcacgttgcgggtcttattgcggcaggtgtttaccctaacccagttccccacgcccatgttgtcacaacaacaacgcataaaacattagccggtcctcgtggcggtctaattttgtctaatgacggcgaagctctttataagaagttgaattcagcggtattccctggtggtcagggtggtcctctaatgcatgttatcgcagcaaaagcggtagccttcaaagaagcaatggaacctgaattcaaagtttatcaagcttgtgttgttgaaaatgcgaaagcaatggttggcgagttcttagaacgcggttacaagattgtatctggtagcactgagaatcacttgttccttgttgatttaatcgacaaaggcatcacaggtaaagaagcggatgccgcactgggtgctgctaacattaccgttaacaaaaacagcgttccaaacgatccacgtagcccgtttgtaacgtctggtattcgtattggtacaccatcaatcactcgccgcggtttcacggttgaagatacaaagcagcttgctggttggatttgtgatgtacttgataacacagataaacctgaagttatcgaagcaacgaaagcgaaagtattagaaatttgtaagcgcttacctgtatacgcttaa

SEQ ID NO: 10350 - protein, 416 aa, Photobacterium profundum SS9
MLKRDMNIADYDAELFAAIQEETARQEEHIELIASENYTSPRVMEAQGSQLTNKYAEGYPGKRYYGGCEFVDKAEQLAIDRACQLFGAEYANVQPHSGSQANNAVYMALLNPGDTVLGMSLAHGGHLTHGSPVNFSGKLYNIIPYGIDETGQIDYEEMEALALEHKPKMIIGGFSAYSQVVDWKRMREIADKVGAYFFVDMAHVAGLIAAGVYPNPVPHAHVVTTTTHKTLAGPRGGLILSNDGEALYKKLNSAVFPGGQGGPLMHVIAAKAVAFKEAMEPEFKVYQACVVENAKAMVGEFLERGYKIVSGSTENHLFLVDLIDKGITGKEADAALGAANITVNKNSVPNDPRSPFVTSGIRIGTPSITRRGFTVEDTKQLAGWICDVLDNTDKPEVIEATKAKVLEICKRLPVYA

SEQ ID NO: 10351 - DNA, 1224 bp, Thermus thermophilus HB8
  CDS (1)..(1224): transl_table=11
atggtgagcaccctcaagcgggacgaggccctctttgagctcatcgccttagaggagaaaaggcagcgggaaggcctggagctcatcgccagcgaaaacttcgtctccaagcaggtgcgggaggcggtggggagcgtcctcaccaacaagtacgccgagggctaccccggggcccggtactacggggggtgcgaggtcattgaccgggtggagtccctggccatagagcgggccaaggccctcttcggggcggcctgggccaacgtccagccccactccggctcccaagccaacatggcggtctacatggccctgatggagccgggggacaccctcatgggcatggacctcgcggccggcggccacctcacccacggctcccgcgtgaacttctccgggaagctttacaaggtggtctcctacggggtccgtcccgacacggagctcatagacctggaggaggtccgccgcctcgccctggagcaccgccccaaggtgatcgtggccggggccagcgcctacccccgcttctgggacttcaaggcctttcgggagatcgccgacgaggtgggggcctacctcgtggtggacatggcccacttcgccgggctcgtggccgcgggcctccacccgaaccccctgccttacgcccacgtggtgacgagcaccacccacaaaaccctccggggcccgaggggcggcctcatcctctccaacgaccccgagctcggcaagaggattgacaagctcatcttccccgggatccagggagggcccttggagcacgtgatcgccgggaaggccgtggccttctttgaggccctacagcccgagttcaaggagtacagccgcctggtggtggaaaacgccaagcgcctggcggaggagcttgcccgccggggctaccgcatcgtcaccggggggacggacaaccacctcttcctcgtggacctgcgccccaaaggcctcaccgggaaggaggcggaggagaggctggacgccgtggggatcacggtgaacaagaacgccatcccctttgaccccaagcccccccgggtcacctcggggatccgcatcggcaccccggccatcaccacccggggcttcacccccgaggagatgcccctcgtcgccgagctcatagaccgggcccttctggagggcccctcggaggccctgcgggaagaggtgcgcaggctcgccctggcccaccccatgccctga

SEQ ID NO: 10352 - protein, 407 aa, Thermus thermophilus HB8
MVSTLKRDEALFELIALEEKRQREGLELIASENFVSKQVREAVGSVLTNKYAEGYPGARYYGGCEVIDRVESLAIERAKALFGAAWANVQPHSGSQANMAVYMALMEPGDTLMGMDLAAGGHLTHGSRVNFSGKLYKVVSYGVRPDTELIDLEEVRRLALEHRPKVIVAGASAYPRFWDFKAFREIADEVGAYLVVDMAHFAGLVAAGLHPNPLPYAHVVTSTTHKTLRGPRGGLILSNDPELGKRIDKLIFPGIQGGPLEHVIAGKAVAFFEALQPEFKEYSRLVVENAKRLAEELARRGYRIVTGGTDNHLFLVDLRPKGLTGKEAEERLDAVGITVNKNAIPFDPKPPRVTSGIRIGTPAITTRGFTPEEMPLVAELIDRALLEGPSEALREEVRRLALAHPMP

SEQ ID NO: 10353 - DNA, 1239 bp, Geobacillus kaustophilus HTA426
  CDS (1)..(1239): transl_table=11
atgaattacttgccacaacaagatccgcaagtgttcgccgctattgagcaagagcggaagcggcaacatgcgaaaattgaactgatcgcctcggaaaactttgtcagccgcgcggtcatggaagcgcaagggtcggtgctgacgaacaaatatgcggaaggctatccgggacgccgctactacggcggttgtgaatatgtcgacatcgtcgaagatttggcgcgcgagcgagcgaagcagttgtttggagcggagcatgtgaacgtccagccgcactccggggcgcaggcgaacatggccgtttatttcaccgttcttgagcacggcgacacggtgcttggcatgaacttgtcgcacggcggccatttgacgcacggcagcccggtcaatttcagcggcattcagtacaattttgtcgaatacggcgtcgatccggaaacgcatgtcattgactatgacgacgtgcgcgaaaaagcgcgccttcaccggccgaagttgatcgtcgccggcgcgagcgcctatccgcgcatcatcgacttcgccaagttccgcgagattgccgatgaagtcggcgcctatttaatggttgacatggcccatattgccggtcttgttgcggcaggtgttcatccgaatccagtgccgtacgcccatttcgttacgacgacgacgcacaaaacgctgcgcggtccgcgcggcgggatgattttatgccaggagcagttcgccaaacagatcgacaaagccattttccctggcattcaaggcggcccgctcatgcatgtcattgccgccaaagccgtcgcgctcggcgaagcgttgcaagacgactttaaagtctacgcgaagcgcgtcgtggagaatgccaaacggctcgcagccgccttgcaaaacgaaggattcactctcatttccggcggcacggacaaccatttgctgcttgtcgatttgcgcccgcagcagctgaccgggaaaacggcggagaaagtgctcgatgaggtcgggattacggtcaacaaaaacacgattccgtacgatccggaaagcccgtttgtcacaagcggcatccgcatcggcacggccgcggtcacgacgcgcggcttcggattggaagagatggacgaaatcgccgccatcatcggccttgtgctgaaaaacgtcggcagcgaacaagcgcttgaggaagcgcgccaacgcgtcgccgctttgacggaaaagtttccgctctatcaagactaa

SEQ ID NO: 10354 - protein, 412 aa, Geobacillus kaustophilus HTA426
MNYLPQQDPQVFAAIEQERKRQHAKIELIASENFVSRAVMEAQGSVLTNKYAEGYPGRRYYGGCEYVDIVEDLARERAKQLFGAEHVNVQPHSGAQANMAVYFTVLEHGDTVLGMNLSHGGHLTHGSPVNFSGIQYNFVEYGVDPETHVIDYDDVREKARLHRPKLIVAGASAYPRIIDFAKFREIADEVGAYLMVDMAHIAGLVAAGVHPNPVPYAHFVTTTTHKTLRGPRGGMILCQEQFAKQIDKAIFPGIQGGPLMHVIAAKAVALGEALQDDFKVYAKRVVENAKRLAAALQNEGFTLISGGTDNHLLLVDLRPQQLTGKTAEKVLDEVGITVNKNTIPYDPESPFVTSGIRIGTAAVTTRGFGLEEMDEIAAIIGLVLKNVGSEQALEEARQRVAALTEKFPLYQD

SEQ ID NO: 10355 - DNA, 1296 bp, Ruegeria pomeroyi DSS-3
  CDS (1)..(1296): transl_table=11
atgaacgcgagccaccaggataccggatttttcacagaggcgctttcggagcgtgatcccgagctgttcggggcgatcacgtccgagctggggcgtcagcgcgacgagatcgagctgatcgcgtcggaaaacatcgtttccgccgccgtgatgcaggcgcagggctcggtgatgaccaacaaatacgccgaaggctaccccggccggcgctattacggcggctgccagtatgtcgacatcgccgagaacctggcgatcgagcgggccaagcagctgtttggctgcggctttgccaatgtgcagcccaactcgggcagccaggccaaccagggcgtgttccaggcgctgatcaagccgggcgacaccatcctgggcatgagcctggacgcgggcggccacctgacccatggcgccgcgcccaaccagtcgggcaaatggttcaacgcggtgcaatacggcgtgcgccagcaggacaacctgctggattacgaccaggtcgaggcgctggccaaggagcaccggcccaagctgatcatcgccggcggctcggcgattccgcgccagatcgattttgcccggatgcgggagattgcggatatggtcggggcctacctccatgtcgatatggcgcatttcgccggtctggttgcggcgggcgagcacccgagcccgtttccgcacgcgcatgtggccaccacgaccacgcacaagaccctgcgcgggccccgtggcggtatgatcctcaccaatgatgaagatatcgctaagaaggtgaattcggcgatctttcccggtatccagggcggcccgctgatgcatgtgatcgcggccaaggcggtggcctttggcgaggcgctgcgccctgaattcaagacgtatattcaacaggttatcgccaatgcccaagcgctgagcgaccagttgatcaagggcggtctggacacggtgacccatggcaccgacacccatgtggtgctggtcgacctgcgccccaagggggtcaagggcaacgccaccgaaaaggctctggggcgcgcgcatatcacctgcaacaagaacggcgtgccgtttgatccggaaaagccgacggtgaccagcggcatccgcctgggcagccccgcgggcaccacgcgcggctttgccgagaccgaattccgccagatcgccgactggatcatcgaggtggtcgatggcctggccgccaatggcgaagacgccaacgaggccgtcgaggacaaggtcaaagcccaggtcgcagccctctgcgcaaaattccctatctatccaaacctttga

SEQ ID NO: 10356 - protein, 431 aa, Ruegeria pomeroyi DSS-3
MNASHQDTGFFTEALSERDPELFGAITSELGRQRDEIELIASENIVSAAVMQAQGSVMTNKYAEGYPGRRYYGGCQYVDIAENLAIERAKQLFGCGFANVQPNSGSQANQGVFQALIKPGDTILGMSLDAGGHLTHGAAPNQSGKWFNAVQYGVRQQDNLLDYDQVEALAKEHRPKLIIAGGSAIPRQIDFARMREIADMVGAYLHVDMAHFAGLVAAGEHPSPFPHAHVATTTTHKTLRGPRGGMILTNDEDIAKKVNSAIFPGIQGGPLMHVIAAKAVAFGEALRPEFKTYIQQVIANAQALSDQLIKGGLDTVTHGTDTHVVLVDLRPKGVKGNATEKALGRAHITCNKNGVPFDPEKPTVTSGIRLGSPAGTTRGFAETEFRQIADWIIEVVDGLAANGEDANEAVEDKVKAQVAALCAKFPIYPNL

SEQ ID NO: 10357 - DNA, 1245 bp, Campylobacter jejuni RM1221
  CDS (1)..(1245): transl_table=11
atgagtttagaaatgtttgataaagaaatttttgatttaacaaacaaagagttagagcgtcaatgcgaaggtcttgaaatgatagcgagtgaaaatttcactttacctgaagtaatggaagttatgggaagtatcttgacgaacaaatacgcagaaggttatccaggtaaaagatattatggtggttgtgaatttgttgatgagattgaaactctagctattgaaagatgtaaaaaactttttaattgtaaatttgctaatgttcagcctaattcaggttctcaagctaatcaaggtgtttatgcggctttgattaatccaggtgataaaattttaggaatggatttaagtcatggtggacatttaactcatggtgcaaaagtaagttcttcgggtaaaatgtacgaaagttgtttttacggcgtagaacttgatggaagaattgattatgaaaaagtaagagaaattgctaaaaaagaaaagccaaaattaatagtttgtggagctagtgcttatgcaagagtgattgattttgctaaatttagagaaatcgctgatgaagtaggcgcctatctttttgctgatatagcacatattgcaggtcttgttgtagcaggcgaacatccaagtccttttccacacgctcatgtagtaagttcaactacgcataaaactttgcgtggcccaagaggtggtattattatgacaaatgatgaagagcttgctaaaaaaattaattctgccatttttccaggtattcaaggtggtcctttgatgcatgtaattgctgcaaaagcagtaggatttaaatttaatcttagcgatgagtggaaagtttatgcaaaacaagtaagaaccaatgctcaagttttagctaatgttttaatggatagaaaatttaaacttgttagcgatggaacggataatcaccttgttttaatgagttttttagatcgtgagtttagcggaaaagatgcagatttagctcttggaaatgcaggtattactgcaaataaaaataccgttccaggagagattagaagtccttttatcacaagtggattaagacttggaactccagcccttactgccagaggttttaaagaaaaagaaatggaaattgtgtcaaattatattgcagatattttagatgatgttaataatgaaaaattacaaaagaatattaaacaagaattaaaaaaacttgcaagtaattttattatttatgaaagggctatgttttga

SEQ ID NO: 10358 - protein, 414 aa, Campylobacter jejuni RM1221
MSLEMFDKEIFDLTNKELERQCEGLEMIASENFTLPEVMEVMGSILTNKYAEGYPGKRYYGGCEFVDEIETLAIERCKKLFNCKFANVQPNSGSQANQGVYAALINPGDKILGMDLSHGGHLTHGAKVSSSGKMYESCFYGVELDGRIDYEKVREIAKKEKPKLIVCGASAYARVIDFAKFREIADEVGAYLFADIAHIAGLVVAGEHPSPFPHAHVVSSTTHKTLRGPRGGIIMTNDEELAKKINSAIFPGIQGGPLMHVIAAKAVGFKFNLSDEWKVYAKQVRTNAQVLANVLMDRKFKLVSDGTDNHLVLMSFLDREFSGKDADLALGNAGITANKNTVPGEIRSPFITSGLRLGTPALTARGFKEKEMEIVSNYIADILDDVNNEKLQKNIKQELKKLASNFIIYERAMF

SEQ ID NO: 10359 - DNA, 1254 bp, Xanthomonas oryzae pv. oryzae KACC10331
  CDS (1)..(1254): transl_table=11
atgttctcgcgcgatgtccgactggaaacctacgaccccgaactggccaaggccatcgctgctgaagccggccgccaggaggatcacgtcgagctgatcgccagcgagaactactgcagccagctggtgatggaagcccagggcagccagctgaccaacaagtacgccgaaggctaccctggcaagcgctactacggcggctgcgcgttcgtcgacattgccgaacagctagcgatcgaccgcatcaagcaggtcttcgatgccgattatgcaaatgtgcagccgcacagcggctcgcaggccaaccaggcggtgtatctggcgctgctgcagccgggcgacaccattttgggcatgagcctggcgcatggcggccacctgacccacggcgccaaggccaacgtctccggcaagctgttcaacgcggtgcagtacggcgtcaacgagcagggcctgatcgattacgacgaagtgcagcgtcttgcgaccgagcacacgccgaagatggtggtggccggtttctcggcgtattcgcagaagatcgactgggcccgcttccgtgccattgccgacagcgttggcgcctatctgttcgtggacatggcccacatcgctggcctcgtggccgccggggtgtatcccagcccgatggaacatgcgcacgtggtgacgtcgacgacgcacaagacgctgcgcggtccgcgtggcggcatcatcgtcgccaagggcgccagcgaagaattgcagaagaagctgcagtcgatcgtgttccccggcattcagggtggcccgctgatgcacgtgatcgccgccaaggcggttgcgttcaaggaagcactggagccggcgttcaagacctaccagcaacaggtggtcaagaatgctcaggcgatggccaacacgctgatcgcacgcgggtacaagatcgtctccggcggcaccgaaaaccatctgatgctggtcgacatgatcggccgcgacgtctccggcaaggatgccgaagccgcgctgggcaaggcacacatcaccgtcaacaagaacgcggtgcccaacgacccgcgctcgccgttcgttacctcgggcctgcgcttgggtaccccggcaatcaccacgcgcggttacaaggaaccggacagcatcgatctggccaactggatcgccgatgtgctcgacgccccgaccgacgaagcggtgctggcgaaagtgcgcgatgcagtgaccgcgcagtgcaagcgttatccggtgtacggctga

SEQ ID NO: 10360 - protein, 417 aa, Xanthomonas oryzae pv. oryzae KACC10331
MFSRDVRLETYDPELAKAIAAEAGRQEDHVELIASENYCSQLVMEAQGSQLTNKYAEGYPGKRYYGGCAFVDIAEQLAIDRIKQVFDADYANVQPHSGSQANQAVYLALLQPGDTILGMSLAHGGHLTHGAKANVSGKLFNAVQYGVNEQGLIDYDEVQRLATEHTPKMVVAGFSAYSQKIDWARFRAIADSVGAYLFVDMAHIAGLVAAGVYPSPMEHAHVVTSTTHKTLRGPRGGIIVAKGASEELQKKLQSIVFPGIQGGPLMHVIAAKAVAFKEALEPAFKTYQQQVVKNAQAMANTLIARGYKIVSGGTENHLMLVDMIGRDVSGKDAEAALGKAHITVNKNAVPNDPRSPFVTSGLRLGTPAITTRGYKEPDSIDLANWIADVLDAPTDEAVLAKVRDAVTAQCKRYPVYG

SEQ ID NO: 10361 - DNA, 1251 bp, Vibrio fischeri ES114
  CDS (1)..(1251): transl_table=11
atgcttaaacgtgatatgaacattgccgattacgatgcagacttatttgcagcaatccaggaagaaacagtacgtcaagaagagcatatcgagctgattgcttctgaaaactacactagcccacgagtaatggaagctcaaggttcacaattaacgaacaaatatgctgaaggttaccctggcaaacgttactacggtggttgtgagtacgtagataaagttgaaacacttgctattgaacgtgcatgtgagttgtttggtgcagagtacgcaaacgtacagcctcactctggttcacaagcaaataacgcagtttacatggcactactaaatgcgggtgatactgtattaggtatgagccttgctcacggtggtcacttaactcacggttctccagtaaacttctctggtaaactttacaacatcattccttacggtattgatgaaaatggtcaaattgactatgaagagatggaagcattagcagtagaacataagcctaagatgatcattggtggtttctctgcttactctcaagtatgtgattgggcacgtatgcgtgaaattgcagacaaagtaggcgcttacttcttcgtagatatggctcacgtagcaggtcttattgctgcaggtgtttaccctaaccctgtgccacatgctcacgttgtaacaacaacgacacacaaaacacttgctggtcctcgtggtggtcttatcctttctaatgaaggtgaagatctttacaagaagttaaactcagcagtattcccgggtggtcaaggtggtcctttaatgcacgttattgctggtaaagcagttgcatttaaagaagcgcttgaacctgagttcaaagaatatcaagcacgtgttgttgctaatgcaaaagcaatggttgctgaattcttagctcgtggttacaacatcgtttcaggttcaacagagaaccacctgttcctagttgatttaattgataaagatattacaggtaaagaagcggatgctgcactaggttctgctaacattacagtaaacaagaactcagtaccgaatgaccctcgtagcccgtttgttacttctggtattcgtattggttctccttcaattacgcgtcgtggttttactgaagaagatgcgaaaaaccttgcaggctggatgtgtgacattctagataacatgggtgatgagtctgtgattgaagcgacaaaagcaaaagtattagaaatctgtaagcgtctaccagtttacgcttaa

SEQ ID NO: 10362 - protein, 416 aa, Vibrio fischeri ES114
MLKRDMNIADYDADLFAAIQEETVRQEEHIELIASENYTSPRVMEAQGSQLTNKYAEGYPGKRYYGGCEYVDKVETLAIERACELFGAEYANVQPHSGSQANNAVYMALLNAGDTVLGMSLAHGGHLTHGSPVNFSGKLYNIIPYGIDENGQIDYEEMEALAVEHKPKMIIGGFSAYSQVCDWARMREIADKVGAYFFVDMAHVAGLIAAGVYPNPVPHAHVVTTTTHKTLAGPRGGLILSNEGEDLYKKLNSAVFPGGQGGPLMHVIAGKAVAFKEALEPEFKEYQARVVANAKAMVAEFLARGYNIVSGSTENHLFLVDLIDKDITGKEADAALGSANITVNKNSVPNDPRSPFVTSGIRIGSPSITRRGFTEEDAKNLAGWMCDILDNMGDESVIEATKAKVLEICKRLPVYA

SEQ ID NO: 10363 - DNA, 1254 bp, Pseudomonas syringae pv. syringae B728a
  CDS (1)..(1254): transl_table=11
atgttcagccgtgatttgactatcgccaagtacgacgccgatctgtttgccgccatggagcaagaagctctgcgtcaggaagaacacatcgagctgattgcctcggaaaactacaccagtccggccgtcatggaagctcagggctcggccctgaccaacaagtacgccgaaggctatccaggcaagcgctactacggtggttgcgagtacgtcgacattatcgagcaactggccatcgaccgcgccaaggaactgttcggcgctgattacgccaacgtccagccacacgccggttcgcaagccaactcggcggtctacctggccctgctgcaaggcggcgacaccattctgggcatgagcctggctcacggtggtcacctgacccacggcgccagcgtttcgtcctcgggcaagctgtacaacgccgttcagtacggcatcgatgccaacggcatgatcgactacgacgaagtcgagcgcctggccgtcgagcacaagccaaaaatgatcgtcgccggtttctctgcctactcgcagatcctcgacttcccgcgcttccgcgccatcgctgacaaggtcggtgcctacctgttcgtcgacatggcgcacgtcgccggtctggtcgccgcaggcgtctacccgaacccggtgccattcgccgacgtcgtgaccaccaccacgcacaagaccctgcgcggtccgcgtggcggcctgatcctggcgcgcgccaacgccgagatcgagaagaagctgaactcggcggtgttccctggctcccagggcggcccgctggagcacgtcatcgcggccaaggccgtgtgcttcaaggaagcgctgcagcctgagttcaagacctaccagcagcaagtggtgaagaacgccaaggccatggccggcgtgttcatcgagcgtggcttcgacgtcgtttccggcggtaccgagaaccacctgttcctgctgtcgctgatcaaacaggacatctccggtaaagacgctgacgccgctctgggtcgcgccttcatcaccgtcaacaagaactccgtaccgaacgacccacgctccccgttcgtcacctccggcctgcgcttcggcaccccggcagtgaccactcgcggcttcaaggaagctgagtgcaaggaactggccggctggatctgcgacatcctggctgacctgaacaacgaagccgtgatcgacgcggttcgtgagaaggtcaaggccatctgcgccaagctgccggtttacggcgcttga

SEQ ID NO: 10364 - protein, 417 aa, Pseudomonas syringae pv. syringae B728a
MFSRDLTIAKYDADLFAAMEQEALRQEEHIELIASENYTSPAVMEAQGSALTNKYAEGYPGKRYYGGCEYVDIIEQLAIDRAKELFGADYANVQPHAGSQANSAVYLALLQGGDTILGMSLAHGGHLTHGASVSSSGKLYNAVQYGIDANGMIDYDEVERLAVEHKPKMIVAGFSAYSQILDFPRFRAIADKVGAYLFVDMAHVAGLVAAGVYPNPVPFADVVTTTTHKTLRGPRGGLILARANAEIEKKLNSAVFPGSQGGPLEHVIAAKAVCFKEALQPEFKTYQQQVVKNAKAMAGVFIERGFDVVSGGTENHLFLLSLIKQDISGKDADAALGRAFITVNKNSVPNDPRSPFVTSGLRFGTPAVTTRGFKEAECKELAGWICDILADLNNEAVIDAVREKVKAICAKLPVYGA

SEQ ID NO: 10365 - DNA, 1254 bp, Pseudomonas syringae pv. syringae B728a
  CDS (1)..(1254): transl_table=11
atgttcagcaagcaagaccagatccagggttatgacgatgcactgttgtcggcgatgaacgccgaggagcagcgtcaggaagaccatatcgagctgatcgcctcggagaactacaccagcaaacgcgtgatgcaggcgcagggcagcggcctgaccaacaagtacgcagagggctatcccggcaagcgttactacggcggttgcgagcacgtcgacaaggtcgagcaactggccatcgaacgcgccagacagctgtttggtgccgactatgccaacgttcagccgcattccggaagtcaggccaacgcagcggtctatctggcgctgcttcaggccggcgataccgtgttgggcatgagcctggcgcacggcggtcatctgactcacggtgccaaggtcagcttctcgggcaaactctataacgccgttcagtacggcatcgacaccgcgaccgggctgatcgattacgacgaagtcgagcgcattgccgtcgaatgccagccgaaaatgatcatcgccgggttttcagcctactccaagaccctcgacttcccgcgcttccgcgcaatcgccgacaaggtgggcgcctacctgttcgtcgacatggcgcacgtcgccggtctggttgcagccggtctttacccgaatccgctgccctacgcagacgtagtcaccaccacgacccacaagaccctgcgcggcccacgcggcggcctgattctggccagggccaacgaagagctggaaaagaaattcaattccgccgtcttccccggtggtcagggcggcccgctgatgcacgtgatcgccgccaaggccgtgtgtttcaaggaagccatggagcccggcttcaaggcctatcaacagcaggtcatcgacaacgcgcaagcgatggcgcaggtgttcatcgaccgaggcttcgacgtggtctccggcggcaccgacaaccatctgtttctggtcagcctgatccgtcagggcctgaccggcaaggacgccgacgccgcgctggggcgtgcgcacatcaccgtcaacaagaactcggtgcccaacgacccgcagtcgccgttcgtgacgtccggcctgcgcatcggcacaccggccgttaccacccgcggcttcaaggtgacccagtgcgtcgagctggccggctggatctgcgacatcctcgacaacctcggtgatgccgatgtcgaggccgacgtcgccagccaggtcgccgccctgtgcgccgattttccggtttatcgctga

SEQ ID NO: 10366 - protein, 417 aa, Pseudomonas syringae pv. syringae B728a
MFSKQDQIQGYDDALLSAMNAEEQRQEDHIELIASENYTSKRVMQAQGSGLTNKYAEGYPGKRYYGGCEHVDKVEQLAIERARQLFGADYANVQPHSGSQANAAVYLALLQAGDTVLGMSLAHGGHLTHGAKVSFSGKLYNAVQYGIDTATGLIDYDEVERIAVECQPKMIIAGFSAYSKTLDFPRFRAIADKVGAYLFVDMAHVAGLVAAGLYPNPLPYADVVTTTTHKTLRGPRGGLILARANEELEKKFNSAVFPGGQGGPLMHVIAAKAVCFKEAMEPGFKAYQQQVIDNAQAMAQVFIDRGFDVVSGGTDNHLFLVSLIRQGLTGKDADAALGRAHITVNKNSVPNDPQSPFVTSGLRIGTPAVTTRGFKVTQCVELAGWICDILDNLGDADVEADVASQVAALCADFPVYR

SEQ ID NO: 10367 - DNA, 1239 bp, Staphylococcus haemolyticus JCSC1435
  CDS (1)..(1239): transl_table=11
atgtcttatatccaaaatcaagataaagctgtctatgaagcgattcaaaatgaatacaatagacaaaataacaacattgaattaatagcatctgaaaattttgtatctgaagcggtaatggaagcacaaggttctgtaatgactaataaatatgctgaaggctatcctggtcgtcgttattatggtggttgtgattatgtagacgttactgaaacaattgctatcgaacgagctaaagcattatttggtgctgaacatgtaaatgtgcaaccacattcaggttctcaagcaaacatggcagtttatcttgtcgctctagagatgggtgatactgttttaggaatgaatttaagtcatggtggtcacttaacacacgggtcaccagttaattttagtggtaaattctataactttgttgactatggtgtagataaggaaactgaaaaaattgactatgaagtggtgcgtcaattagcacatgaacataaaccgaaattaatagttgcaggtacatcagcatattctagacaactggattttaaaaagtttaaagaaatcgctgatgaagttggtgctaaattaatggttgatatggcccatatcgctggtttagtagcagcaggtttacatccaaatcctgttgaacatgcagactttgtcactacaactactcataaaacattacgtggcccacgtggaggcttaattctttgtaaagaagagtataagaaagatatagataaaacaatattccctggaattcaaggtggccctttagagcatgtcattgcagctaaagcagttgcgtttggtgaagcgcttgagcaagattttaaagtttatcaagaacaagtaattaaaaacgctaaagtactttcacaaacattgcaagaagaaggctttagaattgtttcaggagggactgataatcatttactttctgtagatgttaaaaattcagttaatgttactggtaaagaagctgaagcgactttagattctattggaataacatgtaataaaaatacaatcccatttgatcaagaaaaagctttcgtaacaagtggtatacgtttaggtacacctacagcgactacgagaggctttgatgaggaagcgtttaaagaagtaggtcgtattattagcttagcactaaaaaatcctaataatgatactaaattaaaagaggcaagagaaagagtaagtcgtttaactgctaaatatccgctatatgaataa

SEQ ID NO: 10368 - protein, 412 aa, Staphylococcus haemolyticus JCSC1435
MSYIQNQDKAVYEAIQNEYNRQNNNIELIASENFVSEAVMEAQGSVMTNKYAEGYPGRRYYGGCDYVDVTETIAIERAKALFGAEHVNVQPHSGSQANMAVYLVALEMGDTVLGMNLSHGGHLTHGSPVNFSGKFYNFVDYGVDKETEKIDYEVVRQLAHEHKPKLIVAGTSAYSRQLDFKKFKEIADEVGAKLMVDMAHIAGLVAAGLHPNPVEHADFVTTTTHKTLRGPRGGLILCKEEYKKDIDKTIFPGIQGGPLEHVIAAKAVAFGEALEQDFKVYQEQVIKNAKVLSQTLQEEGFRIVSGGTDNHLLSVDVKNSVNVTGKEAEATLDSIGITCNKNTIPFDQEKAFVTSGIRLGTPTATTRGFDEEAFKEVGRIISLALKNPNNDTKLKEARERVSRLTAKYPLYE

SEQ ID NO: 10369 - DNA, 1254 bp, Pseudomonas fluorescens Pf-5
  CDS (1)..(1254): transl_table=11
atgttcagccgtgatttgactattgccaagtacgacgccgatctctttgccgccatggagcaagaagctcagcgccaggaagagcacattgagctgatcgcttcggaaaactacaccagcccagcggtgatggaagctcaaggctcggtactgaccaacaaatacgccgaaggctacccaggcaagcgctactacggcggttgcgaatacgtcgacgtggttgaacagctggccatcgaccgcgccaaggagctgttcggcgccgactacgccaacgtccagccacacgccggttcccaggccaacgccgcggtctacctggccctgctgcaaggcggcgacaccatcctgggcatgagcctggcccacggcggtcacctgacccacggcgccgcggtgtcctcctccggcaagctgtacaacgctatccagtacggcatcgacgccaacggcctgatcgactacgacgaagtcgagcgcctggccgtcgagcacaagccgaaaatgatcgtggccggtttctccgcctactcgcagatcctcgacttcccgcgtttccgcgaaatcgctgacaaagtgggcgcctacctgttcgtcgacatggcccacgtggccggtctggtcgccgctggcgtctacccgaacccggtgccattcgctgacgtcgtgaccaccaccacccacaagaccctgcgcggtccacgtggcggcctgatcctggctcgcgccaacgccgacatcgagaagaagctcaactccgccgtattcccgggcgcccagggtggcccgctggagcacgtgatcgccgctaaagcgatctgcttcaaggaagcgctgcagcctgagttcaaggcctaccaggaacaagtggtgaagaacgcccaggccatggccgaagtgttcatcgcccgcggtttcgatgtggtttccggtggtaccaagaaccacctgttcctgctgtcgctgatcaagcaggacatctccggtaaagacgccgacgccgctctgggcaaagccttcatcaccgtgaacaagaactccgtgccaaacgatccacgctccccgttcgtcacctccggcctgcgcttcggtactccggccgtgaccactcgtggcttcaaggaagccgagtgcaaggaactggccggctggatctgcgacatcctggcggacctgaacaacgaagcggtgatcgacgctgtgcgtgagaaggtcaaggccatctgcaagaagctgccggtatacggcgcttaa

SEQ ID NO: 10370 - protein, 417 aa, Pseudomonas fluorescens Pf-5
MFSRDLTIAKYDADLFAAMEQEAQRQEEHIELIASENYTSPAVMEAQGSVLTNKYAEGYPGKRYYGGCEYVDVVEQLAIDRAKELFGADYANVQPHAGSQANAAVYLALLQGGDTILGMSLAHGGHLTHGAAVSSSGKLYNAIQYGIDANGLIDYDEVERLAVEHKPKMIVAGFSAYSQILDFPRFREIADKVGAYLFVDMAHVAGLVAAGVYPNPVPFADVVTTTTHKTLRGPRGGLILARANADIEKKLNSAVFPGAQGGPLEHVIAAKAICFKEALQPEFKAYQEQVVKNAQAMAEVFIARGFDVVSGGTKNHLFLLSLIKQDISGKDADAALGKAFITVNKNSVPNDPRSPFVTSGLRFGTPAVTTRGFKEAECKELAGWICDILADLNNEAVIDAVREKVKAICKKLPVYGA

SEQ ID NO: 10371 - DNA, 1257 bp, Psychrobacter arcticus 273-4
  CDS (1)..(1257): transl_table=11
atgtttaaagatatttctatcaaagattttgatccagtacttgctaaagccatggctgctgaaagcgtgcgtcaagagaaccatattgagcttatcgcttcagaaaactactgctcacaagctgtgatggaagcacaaggtactgatttgaccaacaaatacgctgaaggctatcctggtaagcgttattatggtggttgtgagcacgttgacgtcgttgagcaattggcaatcgaccgtgcaaaagaattgtttggtgcagaatatgtgaacgtacagccacattctggtagccaagcaaactctgctgtgttcttagcactgcttgaagctaatgatacggtactaggcatgagcttagatgctggtggtcacttgactcatggcgcgcacatcaacttttcaggtctaaactataatgcagtacagtatggtttggtcgaaggcactggtcttatcgattatgaccaagttgagagcttggcaaaagagcataagccaaaaatgatcatcgctggtttctcagcatactcacaagtcgttgattgggcgcgtttccgcgaaatcgctgacgaagtgggcgcttatttgctcgtcgatatggcacacgttgctggtcttatcgctggtggcgtttacccaagcccagtaccatttgctgatgtggttacgacgacaacgcacaaaactctacgtggcccacgttcaggtatgattttggctcgtgatgagaaacttgccaaaaaactaaactctgctgtcttcccaggcaatcaaggtggcccgttgatgcatgttatcgcggccaaagcgatttgctttaaagaagccttagaaaataacttcaaaacctatcagcagcaagtggtgaaaaatgcccaagcgatggcaaaagtcatccaagagcgcggctatgaaatcatctctggtggcactgaaaaccatctaatgctgatcagcctagtgaagcaagaaatgaccggtaaagaagcggataaatggttgggtgatgcgcatatcactgtgaataaaaacgccgtgccaaacgatcctaaatctccattcgtaacctctggtatccgtattggtacaccagcgattacgactcgcggcttcaatgaagcgcaagcaggtgctttggcaggttggatttgtgacgtgttagacagccgtggcgatgaagcagcaaccgctgaagtgcgtagcaaagtagaagcaatctgcaaagagcttcctgtttatgctaaaaaccagtaa

SEQ ID NO: 10372 - protein, 418 aa, Psychrobacter arcticus 273-4
MFKDISIKDFDPVLAKAMAAESVRQENHIELIASENYCSQAVMEAQGTDLTNKYAEGYPGKRYYGGCEHVDVVEQLAIDRAKELFGAEYVNVQPHSGSQANSAVFLALLEANDTVLGMSLDAGGHLTHGAHINFSGLNYNAVQYGLVEGTGLIDYDQVESLAKEHKPKMIIAGFSAYSQVVDWARFREIADEVGAYLLVDMAHVAGLIAGGVYPSPVPFADVVTTTTHKTLRGPRSGMILARDEKLAKKLNSAVFPGNQGGPLMHVIAAKAICFKEALENNFKTYQQQVVKNAQAMAKVIQERGYEIISGGTENHLMLISLVKQEMTGKEADKWLGDAHITVNKNAVPNDPKSPFVTSGIRIGTPAITTRGFNEAQAGALAGWICDVLDSRGDEAATAEVRSKVEAICKELPVYAKNQ

SEQ ID NO: 10373 - DNA, 1254 bp, Colwellia psychrerythraea 34H
  CDS (1)..(1254): transl_table=11
atgttttacaaaaatgatcaaatagccggtttcgatgacagtatttggcaagccatggagcaagaagacaaacgtcaacaagatcacgttgaattaattgcctcagaaaactataccagtgcgcgcgtgatgcaagcccaaggcagtcaactgaccaacaaatacgccgaaggttatcctggtaaacgttattacggcggctgtgaacacgttgatgtgattgagcaactggcgattgatcgtgcaaaagaattgttcggcgctgattacgccaatgtacaaccccattctggctcacaagccaatgccgcagtatttatggccttgcttaagcccggtgaaacggtgctcggcatgagcttagcgcacggtggtcatttaacccacggctctaaagtaagcttctctggtaaaatttataacgcagtgcaatacggcttaaatgaagcaaccggtgaaattgactacgaagaagtcgagcgtcttgcaaaagagcatcaaccgaaaatgattattgccggtttctcagcgtattcacgtgtggttgattggcagcgttttcgtgacattgccgatagcattggcgcgtggttatttgtcgatatggcgcacgtagctggtttagtggcggcaggtctttatcctaacccggtaccgattgcggatgtggtgactaccactacccataaaaccttacgtggtcctcgtggcggtttgattttagcgaaacaaaatgacgaactggctaagaaattaaattcagcggtattccctgccggtcaaggtggcccgttgatgcatgttatcgcggccaaagcgatttgtttcaaagaagcacttggcgagggttatgttgagtatcagcaacaggttatcgataacgcccgtgaaatggcaaaaacattccaaacccgtggttataacgtagtttctggcggtacggacaatcatttatttttattggatttaatcgataaaggtattaccggtaaagacgccgatgctgcgcttggccgcgctaatatcacggtcaataaaaactccgtgcctaacgacccacaatcaccatttgtcaccagtggtctgcgtatcggcacaccagccatcaccagtcgtggttttggacttgaggaagcagcagcattaacgggttggatttgtgatgtgttagatgacattagcaatgagcaagtgattgatgacgtgcgaagtaaagtgttggacttatgtgaaaaaaatccggtctaccgctag

SEQ ID NO: 10374 - protein, 417 aa, Colwellia psychrerythraea 34H
MFYKNDQIAGFDDSIWQAMEQEDKRQQDHVELIASENYTSARVMQAQGSQLTNKYAEGYPGKRYYGGCEHVDVIEQLAIDRAKELFGADYANVQPHSGSQANAAVFMALLKPGETVLGMSLAHGGHLTHGSKVSFSGKIYNAVQYGLNEATGEIDYEEVERLAKEHQPKMIIAGFSAYSRVVDWQRFRDIADSIGAWLFVDMAHVAGLVAAGLYPNPVPIADVVTTTTHKTLRGPRGGLILAKQNDELAKKLNSAVFPAGQGGPLMHVIAAKAICFKEALGEGYVEYQQQVIDNAREMAKTFQTRGYNVVSGGTDNHLFLLDLIDKGITGKDADAALGRANITVNKNSVPNDPQSPFVTSGLRIGTPAITSRGFGLEEAAALTGWICDVLDDISNEQVIDDVRSKVLDLCEKNPVYR

SEQ ID NO: 10375 - DNA, 1254 bp, Colwellia psychrerythraea 34H
  CDS (1)..(1254): transl_table=11
atgttttacaaaaatgatcaaatagccggtttcgatgacagtatttggcaagccatggagcaagaagacaaacgtcaacaagatcacgttgaattaattgcctcagaaaactataccagtgcgcgcgtgatgcaagcccaaggcagtcaactgactaacaaatacgccgaaggttatcctggtaaacgttattacggcggctgtgaacacgttgatgtgattgagcaactggcgattgatcgtgcaaaagaattgttcggcgctgattacgctaatgtacaacctcattctggctcacaagccaatgccgcagtctttatggccttgcttaagcccggtgaaacggtgctgggcatgagcttagcgcacggtggtcatttaacccacggctccaaagtgagcttctccggtaaaatttataacgcggtgcaatacggcttaaatgaagtaaccggtgaaattgactacgacgaagtagcacgtcttgcaaaagagcatcaaccgaaaatgattattgccggtttctcagcgtattcacgtgtagttgattggcagcgttttcgtgacattgccgatagcattggtgcctggttatttgttgatatggcccacgttgccggtttagtggccgcaggtctgtatcctaacccagtaccaattgccgatgtggtaaccaccactacccataaaaccttacgtggtccacgtggcggcttgattttagcgaaacaaaatgacgaactggctaagaaattaaattcagcggttttcccagcaggtcaaggtggcccattgatgcatgttatcgctgccaaagcgatttgtttcaaagaagcacttggtgagggttatgttgagtatcagcaacaggtcatcgataacgcccgtgaaatggcgaaaacattccaaacccgtggttataacgtagtttctggtggtacggacaatcacctatttttattggatttaatcgataaaggtattaccggtaaagacgcggatgctgcgctgggccgcgctaatatcacggtcaacaaaaactcagtgcctaacgacccgcaatcgccatttgtcaccagtggtctgcgtatcggcacaccggccatcaccagtcgtggttttggacttgaagaagcagcagcattaacgggttggatttgtgatgtgttagatgacattagcaatgagcaagtgattgatgacgtgcgaagtaaagtgttggacttatgtgaaaaaaatccggtctaccgctag

SEQ ID NO: 10376 - protein, 417 aa, Colwellia psychrerythraea 34H
MFYKNDQIAGFDDSIWQAMEQEDKRQQDHVELIASENYTSARVMQAQGSQLTNKYAEGYPGKRYYGGCEHVDVIEQLAIDRAKELFGADYANVQPHSGSQANAAVFMALLKPGETVLGMSLAHGGHLTHGSKVSFSGKIYNAVQYGLNEVTGEIDYDEVARLAKEHQPKMIIAGFSAYSRVVDWQRFRDIADSIGAWLFVDMAHVAGLVAAGLYPNPVPIADVVTTTTHKTLRGPRGGLILAKQNDELAKKLNSAVFPAGQGGPLMHVIAAKAICFKEALGEGYVEYQQQVIDNAREMAKTFQTRGYNVVSGGTDNHLFLLDLIDKGITGKDADAALGRANITVNKNSVPNDPQSPFVTSGLRIGTPAITSRGFGLEEAAALTGWICDVLDDISNEQVIDDVRSKVLDLCEKNPVYR

SEQ ID NO: 10377 - DNA, 1254 bp, Pseudomonas syringae pv. phaseolicola 1448A
  CDS (1)..(1254): transl_table=11
atgttcagccgtgatttgactatcgccaagtacgacgccgatctgtttgccgccatggagcaagaagctctgcgtcaggaagaacacatcgagctgattgcctcggaaaactacaccagtccggccgtcatggaagctcagggctcggccctgaccaacaagtacgccgaaggctatccaggcaagcgctactacggtggttgcgagtacgtcgacgttatcgaacaactggccatcgaccgcgccaaggagctgttcggcgctgattacgccaacgtccagccacatgcgggttcgcaagccaactcggcggtctacctggccctgctgcaaggcggcgacaccattctgggcatgagcctggctcacggtggtcacctgacccacggcgccagtgtttcgtcctcgggcaagctgtacaacgccgttcagtacggtatcgatgccaacggcatgatcgactacgacgaagtcgagcgcctggctgtcgagcacaagccaaaaatgatcgtcgccggtttctctgcctactcgcagatcctcgacttcccgcgcttccgtgcaatcgctgacaaggtcggtgcctacctgttcgtcgacatggctcacgtagccggtctggtcgccgcaggcgtctacccgaacccggtgccattcgccgacgtcgtgaccaccaccacacacaagaccctgcgcggtccacgtggcggcctgatcctggcgcgcgccaacgccgaaatcgagaagaagctgaactccgcggtattccctggctcccagggcggtccgctggagcacgtcatcgcagccaaggccgtgtgcttcaaggaagcgctgcagcctgagttcaagacctaccagcaacaagtggtcaagaacgccaaggcaatggccggtgtgttcatcgagcgcggcttcgacgtggtttccgggggtactgaaaaccacctgttcctgctgtcgctgatcaagcaggacatctccggtaaagacgccgacgccgccctgggtcgcgccttcatcaccgtcaacaagaactccgtaccgaacgacccacgctccccgttcgtcacctccggcctgcgcttcggcaccccggcagtgaccactcgcggcttcaaggaagctgagtgcaaggaactggccggctggatctgcgacatcctggctgacctgaataacgaagcggtgatcgacgccgttcgtgagaaggtcaaggccatctgcgcgaagctgccagtttacggcgcttga

SEQ ID NO: 10378 - protein, 417 aa, Pseudomonas syringae pv. phaseolicola 1448A
MFSRDLTIAKYDADLFAAMEQEALRQEEHIELIASENYTSPAVMEAQGSALTNKYAEGYPGKRYYGGCEYVDVIEQLAIDRAKELFGADYANVQPHAGSQANSAVYLALLQGGDTILGMSLAHGGHLTHGASVSSSGKLYNAVQYGIDANGMIDYDEVERLAVEHKPKMIVAGFSAYSQILDFPRFRAIADKVGAYLFVDMAHVAGLVAAGVYPNPVPFADVVTTTTHKTLRGPRGGLILARANAEIEKKLNSAVFPGSQGGPLEHVIAAKAVCFKEALQPEFKTYQQQVVKNAKAMAGVFIERGFDVVSGGTENHLFLLSLIKQDISGKDADAALGRAFITVNKNSVPNDPRSPFVTSGLRFGTPAVTTRGFKEAECKELAGWICDILADLNNEAVIDAVREKVKAICAKLPVYGA

SEQ ID NO: 10379 - DNA, 1254 bp, Pseudomonas syringae pv. phaseolicola 1448A
  CDS (1)..(1254): transl_table=11
atgttcagcaagcaagaccagatccagggttatgacgacgcactgttgtcggcaatgaacgccgaggagcagcgtcaggaagaccatatcgagctgatcgcctcggagaactacaccagcaaacgcgtgatgcaggcgcagggcagcggcctgaccaacaagtacgcagagggctaccctggcaagcgttactacggcggctgcgagcacgtcgacaaggtcgagcaactggccatcgagcgcgccaaacagctgttcggggccgattacgccaacgtacagccacactccggcagccaagccaatgcagcggtctatctggcgttgctgcaagcaggcgacactgtattgggcatgagcctggcgcacggcggtcatctgacccacggtgccaaggtcagcttctcgggcaaactctacaacgccgtgcagtacggcatcgacaccaccaccgggctgatcgattacgacgaagtcgaacgcatcgccgtcgaatgccagccgaaaatgatcattgccggtttctcggcctattcgaagacgctggattttccgcgcttccgtgaaatcgccgacaaggtaggtgcctacctgttcgtcgacatggcacacgttgcaggtctggtggctgccggtctctatccgaacccgctgccgtatgccgatgtggtcaccaccaccacgcacaagacactgcgtggcccacgcggcggcctgattctcgccaaggccaacgaagagctggagaagaaattcaattccgccgtcttccccggcggtcagggcggcccgctgatgcacgttatcgccgccaaggccgtgtgcttcaaggaagcgatggagccaggtttcaaggcttatcaacagcaggtcatcgacaacgcacaagcgatggcgcaggtattcatcgaccgcggcttcgatgtggtttcaggcgggaccgacaaccatttgtttctggtcagcctgatccgtcagggcctgaccggcaaggacgccgacgccgctctgggccgtgcgcacatcaccgtcaacaagaactcggtgcccaacgacccgcagtcgccgttcgtgacctccggtctgcgcatcggcacgccggccgtcaccacccgcggcttcaaggtgacccaatgcgtcgagctggcgggctggatctgcgacattctcgataacctcggtgatgccgatgtcgaggccaacgtcgccagccaggtagcagccttgtgcgccgatttcccggtttatcgctga

SEQ ID NO: 10380 - protein, 417 aa, Pseudomonas syringae pv. phaseolicola 1448A
MFSKQDQIQGYDDALLSAMNAEEQRQEDHIELIASENYTSKRVMQAQGSGLTNKYAEGYPGKRYYGGCEHVDKVEQLAIERAKQLFGADYANVQPHSGSQANAAVYLALLQAGDTVLGMSLAHGGHLTHGAKVSFSGKLYNAVQYGIDTTTGLIDYDEVERIAVECQPKMIIAGFSAYSKTLDFPRFREIADKVGAYLFVDMAHVAGLVAAGLYPNPLPYADVVTTTTHKTLRGPRGGLILAKANEELEKKFNSAVFPGGQGGPLMHVIAAKAVCFKEAMEPGFKAYQQQVIDNAQAMAQVFIDRGFDVVSGGTDNHLFLVSLIRQGLTGKDADAALGRAHITVNKNSVPNDPQSPFVTSGLRIGTPAVTTRGFKVTQCVELAGWICDILDNLGDADVEANVASQVAALCADFPVYR

SEQ ID NO: 10381 - DNA, 1236 bp, Prochlorococcus marinus str. NATL2A
  CDS (1)..(1236): transl_table=11
atgaaatgtgatccaagtattgcgaaattaataaacaatgaattatcaagacaagaaactcatttagagcttatcgcaagcgagaattttgcttctaaggccgtaatggaagcccaaggatcagtcctaacaaataaatatgctgaaggtctccctaacaaacgttattacggaggatgtgagtatgtagacggagttgagcaactagcaatagatagagcaaaaaacctttttggtgccaactgggcaaacgtccaaccacacagcggagctcaagctaactttgcagttttccttagccttctaaagccaggggacacaatcatgggaatggacttatctcatggaggacacctcacgcatggttcacctgtaaatgtaagcggcaaatggtttaaaacttgccattacgaagttgataaaaagactgaaatgctcgatatggatgcaataagaaaaaaagcaattgaaaatcaacctaaattaattatctgtggattctctgcctatccacgaaaaattgacttcaaagctttcagatcaatagctgatgaggtaaatgcttatttattagctgatattgctcatattgctggtttagtggcaagtggacttcacccaagtccaatcccatattgtgatgtagttacaacaactactcacaaaactcttagagggccaaggggtggactaatcctctcaaaagataaggagataggaaaaaagcttgataaagcagtatttcctggcacccaaggaggtcctttagaacatgtaatcgcagccaaggctgttgcattcaaagaagcttctgcacccgaattcaagatctatagccaaaaagtaatctcaaatgcaaaagttctttctaatcaacttcaaaaaagaggaatttcaattgtaagcaaaggaactgacaatcatatagttcttcttgaccttagaagcattggtatgacaggtaaagttgctgatcaattagtaagtgatattaaaataaccgcgaacaaaaacactgtaccttttgacccagagtccccatttgttactagtgggctaaggctaggttcagcagcccttacgactagaggttttaatgaacaagcctttggagatgttggtaatgtcattgcagatagactacttaaccctaatgatgaagatataaaggaaaagtcaatcaataaagtatctgaactttgcaataagtttcctttatatagtgaaaacatctaa

SEQ ID NO: 10382 - protein, 411 aa, Prochlorococcus marinus str. NATL2A
MKCDPSIAKLINNELSRQETHLELIASENFASKAVMEAQGSVLTNKYAEGLPNKRYYGGCEYVDGVEQLAIDRAKNLFGANWANVQPHSGAQANFAVFLSLLKPGDTIMGMDLSHGGHLTHGSPVNVSGKWFKTCHYEVDKKTEMLDMDAIRKKAIENQPKLIICGFSAYPRKIDFKAFRSIADEVNAYLLADIAHIAGLVASGLHPSPIPYCDVVTTTTHKTLRGPRGGLILSKDKEIGKKLDKAVFPGTQGGPLEHVIAAKAVAFKEASAPEFKIYSQKVISNAKVLSNQLQKRGISIVSKGTDNHIVLLDLRSIGMTGKVADQLVSDIKITANKNTVPFDPESPFVTSGLRLGSAALTTRGFNEQAFGDVGNVIADRLLNPNDEDIKEKSINKVSELCNKFPLYSENI

SEQ ID NO: 10383 - DNA, 1248 bp, Ralstonia eutropha JMP134
  CDS (1)..(1248): transl_table=11
atgttcgaacgcagccgctatacgatcgaccagatcgaccccgaggtctttgccgctatccagaaggaaaaccagcgccaggaagaccacatcgagctgatcgcctccgaaaactacacctcgccggccgtgatggctgcgcaaggctcgcaactgaccaacaagtacgccgagggctatcccggcaagcgctactacggtggctgcgagtacgtcgacatcgtcgaacagctggccatcgaccgcgtcaagcagctgttcggcgccgaagccgccaacgtgcagccgaactcgggctcgcaggccaaccagggcgtgtacttcgccgtgctgaagccgggcgacaccatcatgggcatgagcctggccgaaggcggtcacctgacccacggcatggcgctgaacatgagcggcaagtggttcaacgtggtcagctacggcctgaacgcgcaggaagacatcgactacgacgcgctggaaaagctggcacaagagaagaagccgaagctgatcatcgccggcgcatcggccttcgcgctgcgcatcgacttcgagcgcatcggcaaggtcgccaagtcgatcggtgcctacttcatggtcgacatggcccactacgccggcctgatcgccgcgggcgtgtacccgaacccggtgccgcacgccgacttcgtcaccaccaccacgcacaagagcctgcgcggcccgcgcggcggcgtgatcctgatgaaggccgagcatgagaaggccatcaactcgtcgatcttcccgggcatccagggcggtccgctgatgcacgtgatcgctggcaaggccgtcgcgttcaaggaagcgctgacgccggaattcaaggcttaccaggaacaagtggtcaagaacgccgccgtgctggccgaaacgctgatcgcgcgcggcctgcgcattgtctcgggccgcaccgaaagccacgtgatgctggtcgacctgcgcgccaagaacatcaccggcaaggaagccgagcgcatcctgggcgaagcgcacctgaccgtgaacaagaacgcgatcccgaacgatccggaaaagccgttcgtgacctcgggcattcgcgtcggctcgccggccatgaccacgcgcggcttcaaggaagaagaagcgcgtatcgtcggcaacctgatcgccgacgtgctggacaacccgcacgacgcgggcaacatcgccagcgtgcgcgagcaggtttccgccctgaccaagcgttttccggtctacggctga

SEQ ID NO: 10384 - protein, 415 aa, Ralstonia eutropha JMP134
MFERSRYTIDQIDPEVFAAIQKENQRQEDHIELIASENYTSPAVMAAQGSQLTNKYAEGYPGKRYYGGCEYVDIVEQLAIDRVKQLFGAEAANVQPNSGSQANQGVYFAVLKPGDTIMGMSLAEGGHLTHGMALNMSGKWFNVVSYGLNAQEDIDYDALEKLAQEKKPKLIIAGASAFALRIDFERIGKVAKSIGAYFMVDMAHYAGLIAAGVYPNPVPHADFVTTTTHKSLRGPRGGVILMKAEHEKAINSSIFPGIQGGPLMHVIAGKAVAFKEALTPEFKAYQEQVVKNAAVLAETLIARGLRIVSGRTESHVMLVDLRAKNITGKEAERILGEAHLTVNKNAIPNDPEKPFVTSGIRVGSPAMTTRGFKEEEARIVGNLIADVLDNPHDAGNIASVREQVSALTKRFPVYG

SEQ ID NO: 10385 - DNA, 1239 bp, Staphylococcus saprophyticus subsp. saprophyticus ATCC 15305
  CDS (1)..(1239): transl_table=11
atgtcatttattcaaaagcaagataaagaaatatatgaagtgattcaaaatgaatttaaccgtcaaaataacaatatcgagctcattgcttcagagaactttgtttcagaagcagttatggaagcccaaggatcagtgttaacgaacaagtatgctgaaggctatcctaatagaagatattatggcggttgtgaatacgtagatgtgtcagaaacattagctattgatcgtgctaaaaaattatttggcgcagaacatgttaatgttcaaccacactcaggatctcaggccaatatggctgtttatctcgtagcattagaacacggtgatactgtattaggtatgaatttaagccacggtggccatttaacacatggtgcacctgtgaactttagtggtcaattttataactttgtggaatatggtgtagaccaagaaaatgagcaaattgattatgatgaagtattaaaagttgctaaagaacataaacctaaattaattgttgctggtgcatcagcttattcaagaacaatcgatttcaaacgattcaaagaaattgctgatgaagttggcgcaaaattaatggttgatatggcacatatcgctggtttagtcgcagttggtttacatccaaatcctgtggaatatgcagattttgtaacgacaactacacataaaacattacgcggacctcgtggtggcatgattttatgtaaagaagaatataaaaaacaaattgataaaacgatattcccaggtatccaaagtggcccattagagcatgtgattgctgctaaagcagttgcatttggtgaggcattacaagatgactttaaagtttatcaacaacaagtgattcaaaatgctaaaacattagctaacacattgactgacgaaggatttagagttgtatctggaggcacggataatcacctcgtcgcagtagacgtcaaaggttctgtgggtattacaggtaaagttgctgaagaaacactagatgcaattggaataacttgtaataaaaatacaattccttttgatcaagagaaacctttcgtaacgagtggtattcgtttaggtaccccagctgcaacaacacgtggttttgatgaaactgcttttgaagaagttgcgaaaatcattagtttagttttaaaagacccagaaaatgaaaaagcattagccgaagggaaagaaagagttaatactttaacttcaaaacatcctttatataattaa

SEQ ID NO: 10386 - protein, 412 aa, Staphylococcus saprophyticus subsp. saprophyticus ATCC 15305
MSFIQKQDKEIYEVIQNEFNRQNNNIELIASENFVSEAVMEAQGSVLTNKYAEGYPNRRYYGGCEYVDVSETLAIDRAKKLFGAEHVNVQPHSGSQANMAVYLVALEHGDTVLGMNLSHGGHLTHGAPVNFSGQFYNFVEYGVDQENEQIDYDEVLKVAKEHKPKLIVAGASAYSRTIDFKRFKEIADEVGAKLMVDMAHIAGLVAVGLHPNPVEYADFVTTTTHKTLRGPRGGMILCKEEYKKQIDKTIFPGIQSGPLEHVIAAKAVAFGEALQDDFKVYQQQVIQNAKTLANTLTDEGFRVVSGGTDNHLVAVDVKGSVGITGKVAEETLDAIGITCNKNTIPFDQEKPFVTSGIRLGTPAATTRGFDETAFEEVAKIISLVLKDPENEKALAEGKERVNTLTSKHPLYN

SEQ ID NO: 10387 - DNA, 1239 bp, Methanosarcina barkeri str. Fusaro
  CDS (1)..(1239): transl_table=11
atgtcttacattgaaaaaactgatccggaattgttcgaggctataaaaaaagaagccgagcgccaggaatataaactgaaccttatcgcatctgaaaattatgcgagtaaagccgtaatggaagctcagggatcgattctgaccaataaatatgccgaaggatattccggcaagcggtactatggtggctgcgacttcgtggacattgccgaggatctcgcgattgccagggcaaagaaaatctttaacgcaggctacgtcaacgtccagcctcactctggttctggggctaatatggctgtctatttctcggttttgaagccaggagacaccatcatgtccatggatctctctcacggcggtcatctttctcacggcagccctgtgagtttttccggaaagctctttaatattgtgccttacggggtcagtaaaaagactgagatgctggactattccgaacttatgaaaaaagcaaaggaaaacaaaccgcaaatgattgtttgtggagcttcagcttatcctcgtgaaatcgatttcaagcaattccgcgaaattgctgatgaggtaggagcctatctgcttgcagacattgcccacattgcaggtcttgtagttgcaggtgtgcacccgagtccagtaccttatgcggacttcgttaccagcacaacccacaaaactctccgaggcccaagaggcggaattattatctccaagacagaagaacttgcgaccagaattaacaaagcggttttccccggccttcagggtgggcctctcatgcacattatagccggaaaggcagtagcctttaaagaagccatgagtgaaaagttcaaacaggatcaggttcagaccgtaaagaacgcaaaaactctctgcaaatgcctgaaagagaaaggttttgatatggtatctggcgacacggataatcatcttatgcttgtcaatctcaacaatatgaatataacaggcaaggatgcagaagccgccctgagcaaagccgggattattgcaaacaaaaacacggtgccttttgagacacgcagtccatttatcacaagcggtgtaaggctcggaacccctgcctgtaccacgaggggtatgaaggaaacagaaatggaattaattgccgactatattgagaccgcaatcacaaactcagaaaacgataagatcctgtcggaaacaagtgacaaggtcagagaactctgttcaaggttccctgtttattgttaa

SEQ ID NO: 10388 - protein, 412 aa, Methanosarcina barkeri str. Fusaro
MSYIEKTDPELFEAIKKEAERQEYKLNLIASENYASKAVMEAQGSILTNKYAEGYSGKRYYGGCDFVDIAEDLAIARAKKIFNAGYVNVQPHSGSGANMAVYFSVLKPGDTIMSMDLSHGGHLSHGSPVSFSGKLFNIVPYGVSKKTEMLDYSELMKKAKENKPQMIVCGASAYPREIDFKQFREIADEVGAYLLADIAHIAGLVVAGVHPSPVPYADFVTSTTHKTLRGPRGGIIISKTEELATRINKAVFPGLQGGPLMHIIAGKAVAFKEAMSEKFKQDQVQTVKNAKTLCKCLKEKGFDMVSGDTDNHLMLVNLNNMNITGKDAEAALSKAGIIANKNTVPFETRSPFITSGVRLGTPACTTRGMKETEMELIADYIETAITNSENDKILSETSDKVRELCSRFPVYC

SEQ ID NO: 10389 - DNA, 1254 bp, Shigella sonnei Ss046
  CDS (1)..(1254): transl_table=11
atgttaaagcgtgaaatgaacattgccgattatgatgccgaactgtggcaggctatggagcaggaaaaagtacgtcaggaagagcacatcgaactgatcgcctccgaaaactacaccagcccgcgcgtaatgcaggcgcagggttctcagctgaccaacaaatatgctgaaggttatccgggcaaacgctactacggcggttgcgagtatgttgatatcgttgaacaactggcgatcgatcgtgcgaaagaactgttcggcgctgactacgctaacgtccagccgcactccggctcccaggctaactttgcggtctacaccgcgctgctggaaccaggtgataccgttctgggtatgaacctggcgcatggcggtcacctgactcacggttctccggttaacttctccggtaaactgtacaacatcgttccttacggtatcgatgctaccggtcatatcgactacgccgatctggaaaaacaagccaaagaacacaagccgaaaatgattatcggtggtttctctgcatattccggcgtggttgactgggcgaaaatgcgtgaaatcgctgacagcatcggtgcttacctgttcgttgatatggcgcacgttgcgggcctggttgctgctggcgtctacccgaacccggttcctcatgctcacgttgttactaccaccactcacaaaaccctggcgggtccgcgcggcggcctgatcctggcgaaaggtggtagcgaagagctgtacaaaaaactgaactctgccgttttccctggtggtcagggcggtccgttgatgcacgtaatcgccggtaaagcggttgctctgaaagaagcgatggagcctgagttcaaaacttaccagcagcaggtcgcgaaaaacgctaaagcgatggtagaagtgttcctcgagcgcggctacaaagtggtttccggcggcactgataaccacctgttcctggttgatctggttgataaaaacctgaccggtaaagaagcagacgccgctctgggccgtgctaacatcaccgtcaacaaaaacagcgtaccgaacgatccgaagagcccgtttgtgacctccggtattcgcgtgggtactccggcgattacgcgtcgcggcttcaaagaagcagaagcgaaagaactggctggctggatgtgtgacgtgctggacagcatcaatgatgaagccgttatcgagcgcatcaaaggtaaagttctcgacatctgcgcacgtttcccggtttacgcataa

SEQ ID NO: 10390 - protein, 417 aa, Shigella sonnei Ss046
MLKREMNIADYDAELWQAMEQEKVRQEEHIELIASENYTSPRVMQAQGSQLTNKYAEGYPGKRYYGGCEYVDIVEQLAIDRAKELFGADYANVQPHSGSQANFAVYTALLEPGDTVLGMNLAHGGHLTHGSPVNFSGKLYNIVPYGIDATGHIDYADLEKQAKEHKPKMIIGGFSAYSGVVDWAKMREIADSIGAYLFVDMAHVAGLVAAGVYPNPVPHAHVVTTTTHKTLAGPRGGLILAKGGSEELYKKLNSAVFPGGQGGPLMHVIAGKAVALKEAMEPEFKTYQQQVAKNAKAMVEVFLERGYKVVSGGTDNHLFLVDLVDKNLTGKEADAALGRANITVNKNSVPNDPKSPFVTSGIRVGTPAITRRGFKEAEAKELAGWMCDVLDSINDEAVIERIKGKVLDICARFPVYA

SEQ ID NO: 10391 - DNA, 1254 bp, Nitrosococcus oceani ATCC 19707
  CDS (1)..(1254): transl_table=11
atgtatagcaaagagatgcgtattgccagttatgatgaggaactcgagaccgctcttaccaatgaagcacggcggcaagaggaacatattgaattaattgcttcggagaattatgtcagtcctcgggttttagaagcccaagggtccgtgctcactaacaagtacgccgaaggctatcctggcaagcgttattatgggggctgtgagtacgtggatgtggcggagcggttagctatcgaacgggctaaaatattgttcgaggctgattatgctaatgtccaaccccactctggctctcaggcgaatgccgctgcctgtctagctttgctagcgccgggcgataccctcatggggttgagtcttgcccatggcgggcatctcacccatggcgccaaggtcaatttttcaggtcaaatttttaacgcagttcagtttggggtaaatgcagatacgggacttattgactatgatgaggtggagcagctagcaaaggcacatcgccccaaactgattatcgccggatttaccgcttattcccgtatagttgattggcagcgtttccgagcgatcgcggatggagtaggcgcctatttgctagcggatatcgcccatctggccgggatgatcgccgcaggaatttatcctaatccagtgcaaatcgccgatgtcacgactagcacaacccataaaactttacggggtccccgttcaggactgattttggctaaagccaaccctgagattgagaaaaaactcaattccaaggtctttcccggtattcaaggggggcctttaatgcatgttgtcgcggccaaggcggtagcctttaaagaggctatggagccggcgtttaaggattatcaacggcaagtgattcgcaatgcccaggcgatggcagaggctattcagtctcgaggctataaaattgtttccggtgggaccgatagtcatctgtttttagtggatctcgttgccaagggtttgaccggcaaggctgcagatgccgcgttgggtcgagcaaatatcaccgtaaataaaaatacggtgcctaatgatcctcaatctccgtttgtaaccagtggtattcgcattggtagccccgccatgactacgcgtggttttaaggaagcggagatttgcgaattagcgggatgggtttgtgatgtgctggacgatattgaaaatgagactgtaattgcggacactaaggagaaagtattggctctctgcgcccgcttcccggtctatggttag

SEQ ID NO: 10392 - protein, 417 aa, Nitrosococcus oceani ATCC 19707
MYSKEMRIASYDEELETALTNEARRQEEHIELIASENYVSPRVLEAQGSVLTNKYAEGYPGKRYYGGCEYVDVAERLAIERAKILFEADYANVQPHSGSQANAAACLALLAPGDTLMGLSLAHGGHLTHGAKVNFSGQIFNAVQFGVNADTGLIDYDEVEQLAKAHRPKLIIAGFTAYSRIVDWQRFRAIADGVGAYLLADIAHLAGMIAAGIYPNPVQIADVTTSTTHKTLRGPRSGLILAKANPEIEKKLNSKVFPGIQGGPLMHVVAAKAVAFKEAMEPAFKDYQRQVIRNAQAMAEAIQSRGYKIVSGGTDSHLFLVDLVAKGLTGKAADAALGRANITVNKNTVPNDPQSPFVTSGIRIGSPAMTTRGFKEAEICELAGWVCDVLDDIENETVIADTKEKVLALCARFPVYG

SEQ ID NO: 10393 - DNA, 1239 bp, Pseudomonas fluorescens Pf0-1
  CDS (1)..(1239): transl_table=11
atgagcctgcaaaatttcgaccccgccattgcccgcctgatcgaccgcgaacgcaatcgccaggaaactcacctggaactgatcgcctcggaaaactacgtcagtgaagaagtgctccaggcccagggctcgctgctcaccaacaagtacgccgaaggctatccgggccggcgctattacggcggctgcaaggtcgtcgacgagatcgagaacctggccatcgaacgcgcccgcaaactgttcggttgcgagtacgtcaacgtccagccgcactctggttcacaggccaatcaggcggtgttcctggcggtgcttgagcccggcgacaggatactgggcatgtccctggcccacggcgggcacctgacccacggtgcctcggtgaatttctccgggaagtttttccaggccttcacctatgggctggagaaggacagcgaaaccctcgactacgatcagatggaagacctggcccgcgaacaccggccgaagatgatcatcgccggcgcttcagcctattcgcgcgtcatcgacttcccgcgctttcgcaaaatctgcgatgaaatcggcgcttacctgatggtcgacatggcccactacgccggtctcatcgcggcgggcgtgtacccttcgccggtgggcatcgccgacttcatcacctcgaccacgcacaagaccctgcgcggcccgcgcggcggcctgattctggccaaggccgaatacgctgccgtgctcgacaagacgatcttcccggtttatcagggcggcccgctgatgcacgtgatcgccgccaaggctgtggcgttcaacgaagctctgggcgacgagttcaagcattaccagcaacgggtgatcaacaacgcccggaccatggccgacgtgctgacccgacgcggattgcgcgtggtgtccggcggcaccgactgccacatgttcctgctcgacctgcgcgcgatgaacatcaccggcaaggacgccgaagccctgctggaaagcgctcacatcacgctgaacaagaacgcgatccccgatgacccgcagaaaccggcgatcaccagcggcatccgcatcggcacgccggcactgaccactcgcggtttcggtgaggccgaatgcgccgaagtggccaacctgatcgccgacctgctggagcaaccggacaacaccgcgcgggtggaaaacatccgccgtcgagtgatgcacctgtgcgaatgctttccggtgtacctgctgacgtga

SEQ ID NO: 10394 - protein, 412 aa, Pseudomonas fluorescens Pf0-1
MSLQNFDPAIARLIDRERNRQETHLELIASENYVSEEVLQAQGSLLTNKYAEGYPGRRYYGGCKVVDEIENLAIERARKLFGCEYVNVQPHSGSQANQAVFLAVLEPGDRILGMSLAHGGHLTHGASVNFSGKFFQAFTYGLEKDSETLDYDQMEDLAREHRPKMIIAGASAYSRVIDFPRFRKICDEIGAYLMVDMAHYAGLIAAGVYPSPVGIADFITSTTHKTLRGPRGGLILAKAEYAAVLDKTIFPVYQGGPLMHVIAAKAVAFNEALGDEFKHYQQRVINNARTMADVLTRRGLRVVSGGTDCHMFLLDLRAMNITGKDAEALLESAHITLNKNAIPDDPQKPAITSGIRIGTPALTTRGFGEAECAEVANLIADLLEQPDNTARVENIRRRVMHLCECFPVYLLT

SEQ ID NO: 10395 - DNA, 1251 bp, Pelobacter carbinolicus DSM 2380
  CDS (1)..(1251): transl_table=11
atgtctcagactcttattcagcaagatcccgaaatcgccgaggccattcgcctcgaaaccgagcgccaggaatacaatctggaatttatcgcatcggaaaactttgtttccgagcaggtcatggaggcccagggctccatcatgaccaataaatacgccgaaggctatcctgcaaaacgctactacggcggctgcgaaatggtcgatattgccgagcgtctcgccatcgagcgtgccaaggaactgttcggtgccgaacatgccaatgtgcaggcgcatagtggatcgcaggctaacatggctgtctattttgccgcttgtaaaccgggcgacaccgtcctcggtatgaaccttgcccacggcggccatcttacccacggttcaccggtgaatttctccggtaaacttttcaatatcgtttcctacggtgtgcaaaaggaaactgggtacatcgattatgaagaggttgaacgactggctctcgaacacaaaccgactctgttggttgttggtgcaagcgcctatcctcggaccatcgattttcccgctttccgcaagatagcggataaggtcggcgccaagatcatggtcgatatggcgcatatcgcgggtctggttgcggccggagtacatcccagcccggtaccttatgccgaatttgtcaccacaaccacgcataaaaccctgcgcggtccgcgcggcgggatgattctttgtcgtgaggagtttgcaaaaactatcgacagtaatattttccccggcattcagggcggtccgttgatgcacgttatcgctgccaaggccgtttcctttaaagaagcactggcgcccgagtttaaagagtattcgacgcaagtggttaaaaatgccaaggtattggccgatgcgctggtcaaacggggactcaatctcgtttccgggggtaccgacaatcacctcatcctggtcgatttcaccggcactgaaaccaccgggaaaatggccgagaaagcccttgagaaagcgggtattacggttaataaaaactcggttcccttcgaaacccgttcgcccttcgttaccagcggtatccgtctgggaacgccggccaccacgacacgcgggctcaaggaagccgaaatggagcgtgtggccgattgggtggttcgtgctttggataacatggaaaatgatacggaacttgccgctattaagggtgaagttcgtgagatgtgcaaacggttccccctgtatgcacatcttctgaaataa

SEQ ID NO: 10396 - protein, 416 aa, Pelobacter carbinolicus DSM 2380
MSQTLIQQDPEIAEAIRLETERQEYNLEFIASENFVSEQVMEAQGSIMTNKYAEGYPAKRYYGGCEMVDIAERLAIERAKELFGAEHANVQAHSGSQANMAVYFAACKPGDTVLGMNLAHGGHLTHGSPVNFSGKLFNIVSYGVQKETGYIDYEEVERLALEHKPTLLVVGASAYPRTIDFPAFRKIADKVGAKIMVDMAHIAGLVAAGVHPSPVPYAEFVTTTTHKTLRGPRGGMILCREEFAKTIDSNIFPGIQGGPLMHVIAAKAVSFKEALAPEFKEYSTQVVKNAKVLADALVKRGLNLVSGGTDNHLILVDFTGTETTGKMAEKALEKAGITVNKNSVPFETRSPFVTSGIRLGTPATTTRGLKEAEMERVADWVVRALDNMENDTELAAIKGEVREMCKRFPLYAHLLK

SEQ ID NO: 10397 - DNA, 1266 bp, Carboxydothermus hydrogenoformans Z-2901
  CDS (1)..(1266): transl_table=11
gtgacccatttgaacttacgcttaaaagacgtggacccggaaatttttgaggctatggaaaaggaactttcccggcagcgggaaaagattgaactcattgcttcggaaaactttgtaagtagagcggtaatggaggctatgggcagccaccttaccaacaagtacgccgaaggacttcccggaaagcggtattacggcggctgcgaatacgtggatgtggtcgaaaatctcgcccgggagcgggccaagaagctttttggggcagaacacgttaacgtccagccccattccggggctcaggccaatatggctgcgtacatggcgtttttggagccgggggacacggttttgggcatgaacctggcccacggcggtcacttaacccacggaagtccggtgaatttctccggtaagctttataactttgtgagttacggtgtagagccggataccgaaaaaataaattatgaaaaagtttttgagcttgcctacaagcataaacccaaaatgattgttgccggagcatcggcctatccccgggttatcgattttaagcatttaaaggaaattgccgatgaagtgggggcctatcttatggtggacatggcccatattgccggcctggtggcagcaggattgcatccatcacccattccttatgccgatgtggtgaccaccaccacccataaaacgttacgcggtccccgggggggagtgattttctgtaaagcggagcatgcagctaaaatcgataagaccgttttccccggggtacagggtggacctttgatgcacgtaattgccgcaaaagccgtagcttttaaagaagccttatcgccggagtttagggaataccagcagcaggtggtaaataacgctaaagctttagcggaagaactgaaaaagcagggcttaaggttagtttccggcggtaccgataatcacctgatgttagtggatgtgcgtccggtagggcttaccggtaaaagggcggagcagcttttggatgaaattggcgtaacggtaaataaaaacgccattccgtacgaccccgagtcgcccaacgtaacttcgggaattagaattggtaccccagcggtaaccacccgggggatgaaagaaggagaaatggccgaaattgccgaaataatagctctggtcttaaagaatcctgaaaacgaagacaaacaccgggaagcagcccggaaagtacgggatcttttaaaccgcttccctctgtacgataaacttccgtacaacgattaa

SEQ ID NO: 10398 - protein, 421 aa, Carboxydothermus hydrogenoformans Z-2901
MTHLNLRLKDVDPEIFEAMEKELSRQREKIELIASENFVSRAVMEAMGSHLTNKYAEGLPGKRYYGGCEYVDVVENLARERAKKLFGAEHVNVQPHSGAQANMAAYMAFLEPGDTVLGMNLAHGGHLTHGSPVNFSGKLYNFVSYGVEPDTEKINYEKVFELAYKHKPKMIVAGASAYPRVIDFKHLKEIADEVGAYLMVDMAHIAGLVAAGLHPSPIPYADVVTTTTHKTLRGPRGGVIFCKAEHAAKIDKTVFPGVQGGPLMHVIAAKAVAFKEALSPEFREYQQQVVNNAKALAEELKKQGLRLVSGGTDNHLMLVDVRPVGLTGKRAEQLLDEIGVTVNKNAIPYDPESPNVTSGIRIGTPAVTTRGMKEGEMAEIAEIIALVLKNPENEDKHREAARKVRDLLNRFPLYDKLPYND

SEQ ID NO: 10399 - DNA, 1254 bp, Xanthomonas campestris pv. vesicatoria str. 85-10
  CDS (1)..(1254): transl_table=11
atgttctcgcgcgatgtccgactggaaacctacgaccccgaactggccaaggccatcgctgctgaagccggccgccaggaggatcatgtcgagctgatcgccagcgaaaactattgcagcccgctggtgatggaagcgcagggcagccagctgaccaacaagtacgccgaaggctatccgggcaagcgctactatggtggctgcgagttcgtcgacattgccgaacaactggcgatcgaccgcatcaaacaggtgtttggcgccgattacgcgaacgtccagccgcacagcggttcccaggccaaccaggcggtgtatctggcgctgctgcagccgggcgacaccatcctgggcatgagcctggcacatggcggccacctgacccacggcgcaaaggtcaacgtctccggcaagctgttctacgcggtgcagtacggcgtcaacgagcagggcctgatcgattacgacgaggtccagcgcctggcgaccgagcacaagccgaagatggtggtggccggtttctccgcgtattcgcagaagatcgactgggcccgcttccgcgccatcgccgacagcgtcggcgcctatctgttcgtggacatggcgcacattgccgggctggtcgccgccggggtgtaccccagcccgatggaacatgcgcacgtggtcacttcgaccacgcacaagacactgcgtggcccgcgtggcggcatcatcgtcgccaagggtgccagcgaagagctgcagaaaaagctgcagtcgatcgtgttccccggcatccagggcggcccgctgatgcacgtcatcgcggccaaggcggtggcgttcaaggaggcgttggagccggcgttcaagacctatcagcaacaagtggtcaagaacgcccaggcgatggccaataccctcattgcgcgcggctacaagatcgtctccggcggcaccgagaaccacctgatgctggtggacatgatcggtcgcgatgtctccggcaaggacgccgaagctgcgcttggcaaggcgcacatcaccgtcaacaagaattcggtccccaacgacccgcgctcgccgttcgtcacttccggtctgcgcctgggcaccccggcgatcaccacgcgcggttaccaggaacaggacagcatcgacctggccaactggatcgccgacgtgctcgacgcgccaaccgacgaagccgtgctggcgaaggtgcgcgatgccgtgaccgcgcagtgcaagcgctatccggtttacggctaa

SEQ ID NO: 10400 - protein, 417 aa, Xanthomonas campestris pv. vesicatoria str. 85-10
MFSRDVRLETYDPELAKAIAAEAGRQEDHVELIASENYCSPLVMEAQGSQLTNKYAEGYPGKRYYGGCEFVDIAEQLAIDRIKQVFGADYANVQPHSGSQANQAVYLALLQPGDTILGMSLAHGGHLTHGAKVNVSGKLFYAVQYGVNEQGLIDYDEVQRLATEHKPKMVVAGFSAYSQKIDWARFRAIADSVGAYLFVDMAHIAGLVAAGVYPSPMEHAHVVTSTTHKTLRGPRGGIIVAKGASEELQKKLQSIVFPGIQGGPLMHVIAAKAVAFKEALEPAFKTYQQQVVKNAQAMANTLIARGYKIVSGGTENHLMLVDMIGRDVSGKDAEAALGKAHITVNKNSVPNDPRSPFVTSGLRLGTPAITTRGYQEQDSIDLANWIADVLDAPTDEAVLAKVRDAVTAQCKRYPVYG

SEQ ID NO: 10401 - DNA, 1248 bp, Burkholderia sp. 383
  CDS (1)..(1248): transl_table=11
atgtttgacagagcccaaagcaccattgcgaacgtcgatcccgaaatctttgccgcgatcgagcaggaaaaccgccgccaggaagatcacatcgagctgatcgcgtcggaaaactacacgagcccggccgtgatggctgcgcagggttcgcaactcacgaacaagtacgcggaagggtatccgggcaagcgctactacggcggctgcgaatacgtggacgtcgttgagcagctggcgatcgaccgcgtgaagcagctgttcggcgcggaagcggcgaacgtgcagccgaactcgggttcgcaggcgaaccagggcgtgttcttcgcgatgctcaagccgggcgacacgatcatgggcatgagcctcgcgcacggcggccacctgacgcacggctcgcccgtgaacatgtcgggcaagtggttcaacgtggtgagctacggcctgaacgaaaacgaagacatcgactacgaagcggccgagcagctcgcgcaggaacacaagccgaagctgatcgtcgcgggcgcgtctgcgttctcgctgaagatcgatttcgagcgtctggcgaagatcgcgaagtcggtcggcgcgtacctgatggtcgacatggcccactacgcaggcctgatcgcagcgggcgtgtacccgaacccggtgccgcacgcggacttcgtgacgacgacgacgcacaagagcctgcgcggcccgcgcggcggcgtgatcctgatgaaggccgagtacgagaagccgatcaactcggcgatcttcccggggatccagggcggcccgctgatgcacgtgatcgcgggcaaggccgtggcgttcaaggaagcgctgtcgccggaattcaaggcgtaccaggagaaggtggtcgagaacgcccgcgtgctggctgaaacgctggtgaagcgtggcctgcggatcgtgtcgggccgtacggaaagccacgtgatgctggtggacctgcgtgcgaagcacatcacgggcaaggcggcggaagcagcgctgggcgcggcgcacatcacggtgaacaagaacgcgatcccgaacgatccggaaaagccgttcgtgacgagcggtgtgcgcctgggttcgccggcaatgacgacgcgcggcttcggtccggcggaagcggaacaggtgggtaacctgatcgcggacgtgctggacaacccggaagatgcagcgacgatcgagcgcgtgcgcgcgcaggtcgccgagctgaccaagcgtttcccggtctatcgctga

SEQ ID NO: 10402 - protein, 415 aa, Burkholderia sp. 383
MFDRAQSTIANVDPEIFAAIEQENRRQEDHIELIASENYTSPAVMAAQGSQLTNKYAEGYPGKRYYGGCEYVDVVEQLAIDRVKQLFGAEAANVQPNSGSQANQGVFFAMLKPGDTIMGMSLAHGGHLTHGSPVNMSGKWFNVVSYGLNENEDIDYEAAEQLAQEHKPKLIVAGASAFSLKIDFERLAKIAKSVGAYLMVDMAHYAGLIAAGVYPNPVPHADFVTTTTHKSLRGPRGGVILMKAEYEKPINSAIFPGIQGGPLMHVIAGKAVAFKEALSPEFKAYQEKVVENARVLAETLVKRGLRIVSGRTESHVMLVDLRAKHITGKAAEAALGAAHITVNKNAIPNDPEKPFVTSGVRLGSPAMTTRGFGPAEAEQVGNLIADVLDNPEDAATIERVRAQVAELTKRFPVYR

SEQ ID NO: 10403 - DNA, 1323 bp, Burkholderia sp. 383
  CDS (76)..(1323): transl_table=11
atggaatgcgaaggccgaaacaccatgcagccggcaagccgcggtcagtcattcactctcaactggtcaatcatcatgttcaaccgcaccaccagcaccgttgccaacgtcgatccggaactttatgccgcgatcgagcaggaaaaccgccgccaggaagatcacatcgagctgatcgcgtcggaaaactacacgagcccggccgtgatggctgcgcagggttcgcaactcacgaacaagtacgcggaagggtatccgggcaagcgctactacggcggctgcgaatacgtggacgtggttgagcagctggcgatcgaccgcgtgaagcagctgttcggtgcggaagcggcgaacgtgcagccgaactcgggttcgcaggcgaaccagggcgtgttcttcgcgatgctcaagccgggcgacacgatcatgggcatgagcctcgcgcacggcggccacctgacgcacggctcgcccgtgaacatgtcgggcaagtggttcaacgtggtgagctacggcctgaacgaaaacgaagacatcgactacgaagcggccgagcagctcgcgcaggaacacaagccgaagctgatcgtcgcaggcgcgtcggcattctcgctgaagatcgatttcgagcgtctggcgaagatcgcgaagtcggtcggcgcgtacctgatggtcgacatggcccactacgcaggcctgatcgcagcgggcgtgtacccgaacccggtgccgcacgcagacttcgtgacgacgacgacgcacaagagcctgcgcggcccgcgcggcggcgtgatcctgatgaaggccgagtacgagaagccgatcaactcggcgatcttcccggggatccagggcggcccgctgatgcacgtgatcgcgggcaaggccgtggcgttcaaggaagcgctgtcgccggaattcaaggcgtaccaggagaaggtggtcgagaacgcccgcgtgctggctgaaacgctggtgaagcgtggcctgcggatcgtgtcgggccgtacggaaagccacgtgatgctggtggacctgcgtgcgaagaacatcacgggcaaggcagcggaagcagcgctgggtgctgcgcacatcacggtgaacaagaacgcgatcccgaacgatccggaaaagccgttcgtgacgagcggcgtgcgcctgggttcgccggcaatgacgacgcgcggcttcggcgtgaaggaagcggagatcgtcggcaacctgatcgccgatgtgctggaagcgccggaagatgcggccacgctcgagcgtgtgcgcgggcaggtcgccgaactgacgaagcgtttccccgtctacggctga

SEQ ID NO: 10404 - protein, 415 aa, Burkholderia sp. 383
MFNRTTSTVANVDPELYAAIEQENRRQEDHIELIASENYTSPAVMAAQGSQLTNKYAEGYPGKRYYGGCEYVDVVEQLAIDRVKQLFGAEAANVQPNSGSQANQGVFFAMLKPGDTIMGMSLAHGGHLTHGSPVNMSGKWFNVVSYGLNENEDIDYEAAEQLAQEHKPKLIVAGASAFSLKIDFERLAKIAKSVGAYLMVDMAHYAGLIAAGVYPNPVPHADFVTTTTHKSLRGPRGGVILMKAEYEKPINSAIFPGIQGGPLMHVIAGKAVAFKEALSPEFKAYQEKVVENARVLAETLVKRGLRIVSGRTESHVMLVDLRAKNITGKAAEAALGAAHITVNKNAIPNDPEKPFVTSGVRLGSPAMTTRGFGVKEAEIVGNLIADVLEAPEDAATLERVRGQVAELTKRFPVYG

SEQ ID NO: 10405 - DNA, 1323 bp, Pelodictyon luteolum DSM 273
  CDS (1)..(1323): transl_table=11
atggacaccgatatcctgaagatgcaggaccgtgaggtttttgacgcgattgccggtgaaacggtacgccagatggaaaccctcgagctgatcgcctcggagaacttcaccagccgtgcggtcatgcaggcatgtggttcggtgatgaccaacaagtatgccgagggctatcccggcaagcgatactacggcggttgcgagttcgtcgacatcgccgaggatctggcccgtgagcgtgccaggaaactgttcgggtgcgaatatgtcaacgtccagccccattcgggttcgagtgccaacatggccgtgctcttttccgtcctgaaacccggcgaccgtatcatgggcctcgacctttcccatggaggtcacctgacccacggcagctccgtgaacttttccggccagatgttcgacgcccgctcatacggagtggatcgcgagaccggcatcatcgatatgaacaaggtcgaggaaatggctcttgacttcaagccccgcctgattatctgcggagccagcgcctactctcagggcttcgacttcaaggccttccgcgagatcgccgacaaggtcggcgcgttcctcatggccgatatcgcacacccggcagggctcatcgcagcaggactgctgacggacccgatgccgcactgccactttgtgaccaccaccacccataagaccctccgcggtccccgcggcggcatgatcatgatgggcaaggacttcgagaacccgatgggcatcaccatcaagacgaagaacggcccgagggtgaagatgatgtcggaggtgatggacgccgaggtcatgcccggcatccagggtggcccgcttatgcacatcattgccggcaaggcggtcgcattcggtgaggcgctccgtcccgagttccgcgagtatgccgtgcaggtgcgcaaaaacgccgcttcaatggcggaacgcttcacttccctcggatacaatatcgtcagcggtggtacaaagaaccatctcatgctgcttgacctgcgcaacaaggatgtcaacggcaaggttgccgagaacctcctgcacgatgcaggcatcacggtcaacaagaatatggttcccttcgacgacaagtcacccttcgtgaccagtggcatccgcatcggaaccgccgccatgacgacaaggggcatgaaagaagccgatgccacccttattgccgaactcattgaccgggtgatcaccggagcagccgagagcactatcgctgcgacctgtaaagatgtaaaggcggagatccgttcgctctgcctccaaaacccgctcgaaggttacggcgtgactccctga

SEQ ID NO: 10406 - protein, 440 aa, Pelodictyon luteolum DSM 273
MDTDILKMQDREVFDAIAGETVRQMETLELIASENFTSRAVMQACGSVMTNKYAEGYPGKRYYGGCEFVDIAEDLARERARKLFGCEYVNVQPHSGSSANMAVLFSVLKPGDRIMGLDLSHGGHLTHGSSVNFSGQMFDARSYGVDRETGIIDMNKVEEMALDFKPRLIICGASAYSQGFDFKAFREIADKVGAFLMADIAHPAGLIAAGLLTDPMPHCHFVTTTTHKTLRGPRGGMIMMGKDFENPMGITIKTKNGPRVKMMSEVMDAEVMPGIQGGPLMHIIAGKAVAFGEALRPEFREYAVQVRKNAASMAERFTSLGYNIVSGGTKNHLMLLDLRNKDVNGKVAENLLHDAGITVNKNMVPFDDKSPFVTSGIRIGTAAMTTRGMKEADATLIAELIDRVITGAAESTIAATCKDVKAEIRSLCLQNPLEGYGVTP

SEQ ID NO: 10407 - DNA, 1290 bp, Synechococcus sp. CC9902
  CDS (1)..(1290): transl_table=11
atgagccaggtctccgaacgggccattaatgcaggtctggcttcggctgaccccgaaatttcccgtctgattgatcaggagcgtcatcgtcaggaaacacaccttgagctcatcgccagcgagaattttgcgtcgcaggccgtgatgcaagcgcagggttctgtgctcaccaacaaatatgccgagggcctacccgccaagcgttattacggcggttgtgagcacgttgatgccatcgaaaccttggcgattgaacgcgccaagcagttgttcgatgctgcatgggccaatgtccagccgcacagtggtgcgcaggccaacttcgcagtgtttctggcgttgttgaagcccggcgacacgatcatggggcttgatctttcccatggcggtcacctcacccatgggtcgcccgtcaacgtgagcggcaaatggttcaacgttgttcagtacggcgttgatcccacaacccagcgtctcgatatggaggcgattcggaagcttgctctcgagcacaaaccaaaactgatcgtgtgcggctactcggcttatccacgcacgatcgatttcgcggcttttcgctccatcgccgatgaggttggagcctttttgttggctgatatggcccacatcgcgggactcgtcgcagctggtgtccaccccagcccagttcctcactgcgatgtcgtgaccaccacgacccataaaaccttgcgcgggcccaggggtggtttgattctgtgtcgggatgcggagttcgccaagaagttcgacaaagccgtcttcccaggcacgcaggggggaccgttggagcacgtgatcgcggccaaagctgttgcctttggtgaggcgcttcaaccgtcgttcaaaacctatagccagcaggtggtggccaacgccggagccttagcagagcagttgatctcccgggggatcaacgtggtgagtggcggaaccgataaccacgttgtgttgctcgatttacgctcgatcggcatgaccggcaaggtggccgacctgctcgtgagtgatgtgcacatcacggccaataagaacaccgtgccctttgacccagagtcccctttcgtcacgagtggactccgcctaggcaccgctgcactcaccacacgcggctttgatgtcgatgcattcagggaggtggcggatgtgattgccgaccgcttgcaccatcctgaggacgatgcgattcgtcagcgctgtcttgagcgcgtgtcgatcctttgctcccgcttccctctttacgccgacagcaaagagcccgcgctcgtatga

SEQ ID NO: 10408 - protein, 429 aa, Synechococcus sp. CC9902
MSQVSERAINAGLASADPEISRLIDQERHRQETHLELIASENFASQAVMQAQGSVLTNKYAEGLPAKRYYGGCEHVDAIETLAIERAKQLFDAAWANVQPHSGAQANFAVFLALLKPGDTIMGLDLSHGGHLTHGSPVNVSGKWFNVVQYGVDPTTQRLDMEAIRKLALEHKPKLIVCGYSAYPRTIDFAAFRSIADEVGAFLLADMAHIAGLVAAGVHPSPVPHCDVVTTTTHKTLRGPRGGLILCRDAEFAKKFDKAVFPGTQGGPLEHVIAAKAVAFGEALQPSFKTYSQQVVANAGALAEQLISRGINVVSGGTDNHVVLLDLRSIGMTGKVADLLVSDVHITANKNTVPFDPESPFVTSGLRLGTAALTTRGFDVDAFREVADVIADRLHHPEDDAIRQRCLERVSILCSRFPLYADSKEPALV

SEQ ID NO: 10409 - DNA, 1317 bp, Chlorobium chlorochromatii CaD3
  CDS (1)..(1317): transl_table=11
atggatactgatattctgcaaaagcaagatgccgaagtgtttgcctccattgccaacgaaaccaaacggcaaaccgaaacgctggagctgattgcctccgaaaactttaccagccgcgccgttatgcaagcgtgcggctctgtaatgaccaataaatatgctgaaggctaccccggcaaacgctactacggcggctgcgaatttgttgacgttgccgaaaatcttgctcgcgatcgtgctaaaaagctctttggttgcgagtacgttaacgttcaaccccactcaggttcaagcgccaacatggcagtgctcttttcggtgctaaaacccggcgataaaattatggggcttgacctttcacacggaggacacctcacgcatggcagttcagtaaacttttcagggcagatgtttgaagcgcactcctacggcgttgatcgcgaaacaggctgcattgatatgaataaggttgaagagatggcaatgcaagttcgcccaaaactcattattgggggagcaagcgcctactcgcaaggatttgactttaaagccttccgtgcaattgccgataaagttggcgcattgctgatggcggatattgctcaccctgcggggctgattgcggctggacttctgccaaacccactccaacactgccactttgtaaccaccaccacccacaaaaccttacgtggacctcgtggcggcatgattatgatgggcagcgactttgaaaatccccttggcattaccattaaaaccaaaaccggcagccgcgttaaaatgatgtcggaagtgatggatgcagaagtaatgccgggcattcaaggcggtccactcatgcacattattgccggtaaagccgtagcctttggggaagcgttgcaaccagcatttaaggaatacgctgctcaggttatgaaaaatgcctcaacaatggcaagccgttttatggaacttggctacaccattgtaagcggtggcaccaaaaaccacttgatgttgcttgacttacgcaacaaaaacgttactggtaaagaagctgaaaatctgctccatgaagcaggtattaccgtcaacaaaaacatggtgccatttgacgacaaatcgccatttgtaaccagcggcattcgcattggcacccccgccatgaccacacgcggcatgaaagaagctgaaagccgccgtattgcagaattaattgatcaagtaattacttccgccagcaagcctgatattagcgctatttgcgaagccgttcgcgaagaaattaaaaccatctgccacaacaacccgattgaagggtatagcgtataa

SEQ ID NO: 10410 - protein, 438 aa, Chlorobium chlorochromatii CaD3
MDTDILQKQDAEVFASIANETKRQTETLELIASENFTSRAVMQACGSVMTNKYAEGYPGKRYYGGCEFVDVAENLARDRAKKLFGCEYVNVQPHSGSSANMAVLFSVLKPGDKIMGLDLSHGGHLTHGSSVNFSGQMFEAHSYGVDRETGCIDMNKVEEMAMQVRPKLIIGGASAYSQGFDFKAFRAIADKVGALLMADIAHPAGLIAAGLLPNPLQHCHFVTTTTHKTLRGPRGGMIMMGSDFENPLGITIKTKTGSRVKMMSEVMDAEVMPGIQGGPLMHIIAGKAVAFGEALQPAFKEYAAQVMKNASTMASRFMELGYTIVSGGTKNHLMLLDLRNKNVTGKEAENLLHEAGITVNKNMVPFDDKSPFVTSGIRIGTPAMTTRGMKEAESRRIAELIDQVITSASKPDISAICEAVREEIKTICHNNPIEGYSV

SEQ ID NO: 10411 - DNA, 1296 bp, Synechococcus sp. CC9605
  CDS (1)..(1296): transl_table=11
atgagccaggcctctggacgcgccatcgacgctgatctggctcagtcggatcccgacatcgctgcgttcatcaaccaggaacggcagcgtcaggaaacccacctcgagctgatcgcatcggagaactttgcgtcccgtgcggtgatgcaggcccagggttccgttctcaccaacaagtacgccgagggtctgcccagcaagcggtactacggcggttgtgaacacgttgatgccattgaagagctggccatcgagcgggccaagcagttgtttggtgccgcttgggccaatgtgcagccccacagcggtgcccaggccaacttcgcggttttcctggcgctgctacagcctggcgacacgatcatggggctcgatctgtcccatggaggtcacctgacccatggttccccggtcaacgtcagcggcaagtggttcaacgtcgtccagtacggcgtcgacaaggagacccaacgccttgatatggaggcgatccgccagctggctttggagcacaagccgaagctgattgtctgtggctactccgcgtatccacgcaccatcgacttcgccgccttccgcgccatcgctgatgaagtgggtgcctatctgctggccgacatggcccacatcgccggcctcgtggccgctggagtgcatcccagccctgtcccccactgcgatgtggtgaccaccaccacccacaagaccctgcgcggtccccgcggcggcttgatcctctgccgcgatgccgagttcgccaaaaagttcgacaaggccgtgttccctggcagccagggcggccctctggagcacgtgatcgctgctaaggctgtggccttcggggaagcactgcagccttcgttcaaggcctatagccagcaggtggttgccaatgcggcagccctcgctgaacagctgatcgcccgcggcatcgatgtcgtcagcggcggcaccgataaccacgtggtgctgttagacctgcgtagcatcgggatgactggaaaagtggctgatctgttggtgagtgatgtgcacatcacggccaacaagaacaccgttcccttcgaccctgaatcgcccttcgtcaccagtggcctgcgattcggaacagctgcgctcaccacccgtggtttcgattcgcaggctttccgggaggtcgccgatgtgattgccgaccgtcttttcaatcctgaggatgatgcgattcgtcagcgttgcctcgaccgggtgggtgctctatgtgagcgcttccccctctacgccgacagcaagcacaagcagcctgttctggtgtga

SEQ ID NO: 10412 - protein, 431 aa, Synechococcus sp. CC9605
MSQASGRAIDADLAQSDPDIAAFINQERQRQETHLELIASENFASRAVMQAQGSVLTNKYAEGLPSKRYYGGCEHVDAIEELAIERAKQLFGAAWANVQPHSGAQANFAVFLALLQPGDTIMGLDLSHGGHLTHGSPVNVSGKWFNVVQYGVDKETQRLDMEAIRQLALEHKPKLIVCGYSAYPRTIDFAAFRAIADEVGAYLLADMAHIAGLVAAGVHPSPVPHCDVVTTTTHKTLRGPRGGLILCRDAEFAKKFDKAVFPGSQGGPLEHVIAAKAVAFGEALQPSFKAYSQQVVANAAALAEQLIARGIDVVSGGTDNHVVLLDLRSIGMTGKVADLLVSDVHITANKNTVPFDPESPFVTSGLRFGTAALTTRGFDSQAFREVADVIADRLFNPEDDAIRQRCLDRVGALCERFPLYADSKHKQPVLV

SEQ ID NO: 10413 - DNA, 1248 bp, Geobacter metallireducens GS-15
  CDS (1)..(1248): transl_table=11
atgtcgatcctcgaaacctttgacccggcagtagccgaggccatccgtcatgaaaccgagcgccaggagtacaatctggagctcattgcgtccgaaaactttgtctccgaagcagtgatggaggcccaggggtcggttctgaccaacaaatatgctgaagggtaccctggcaagcgatactatggcggttgccaccatgtggatgtggtggagaaccttgcaattgagcgggcgaaagaactttttggtgccgatcatgcgaacgtccagccccactccggctcccaagccaatatggcggtttatttctcggtgctgaagccgggcgacaccattctcggcatgaatctctcccacggcggccaccttacccacggtagcccggtgaacttctcgggccggttcttcaacgtggttccctatggtgtttcccaggaaaccgagacgattgacttcaacgaagtcgagcgtctggcccttgagcataagccgaagctgatcgttgtgggggccagcgcctatccacgtgttctggattttgccgccttcagggccatagccgacaaagtgggggcgctggtcatggtggacatggcccatattgcggggctcgttgctgccggccttcacccaagcccggttccctatgccgagtttgtcaccacgacaacccacaaaaccctgcgtggaccccgcggcgggatgattctctgccgcgaggaatttgccaagaccctcaattccaatattttccccggtattcagggcggccctctcatgcatgtcatcgcggccaaggcagttgccttcaaagaggctcttgcgcctgaattcaagttgtatcaggagcagattgtcaagaatgcacggacccttgctgacgaactcatgaagcgcggcttccggcttgtctccggaggtaccgacaaccacctgatgcttgttaacctgacgggcaccgagttgaccggcaaggtggccgaggaggccctcgacaaagcgggtatcacggtcaacaagaacaccgtcccctttgagacacgctctccctttgttacctccggcttccggatcggtactcctgctgccacaagtcatggactcaaagaggcggagatggtggaagttgccgctttcatcgccgaggccttggcaaatgtggggaacgaggcaaagcttgcagaggtaaaggggaaagtgaacgcccttatgggccgttttccgctctatgccagccgcctgaagtaa

SEQ ID NO: 10414 - protein, 415 aa, Geobacter metallireducens GS-15
MSILETFDPAVAEAIRHETERQEYNLELIASENFVSEAVMEAQGSVLTNKYAEGYPGKRYYGGCHHVDVVENLAIERAKELFGADHANVQPHSGSQANMAVYFSVLKPGDTILGMNLSHGGHLTHGSPVNFSGRFFNVVPYGVSQETETIDFNEVERLALEHKPKLIVVGASAYPRVLDFAAFRAIADKVGALVMVDMAHIAGLVAAGLHPSPVPYAEFVTTTTHKTLRGPRGGMILCREEFAKTLNSNIFPGIQGGPLMHVIAAKAVAFKEALAPEFKLYQEQIVKNARTLADELMKRGFRLVSGGTDNHLMLVNLTGTELTGKVAEEALDKAGITVNKNTVPFETRSPFVTSGFRIGTPAATSHGLKEAEMVEVAAFIAEALANVGNEAKLAEVKGKVNALMGRFPLYASRLK

SEQ ID NO: 10415 - DNA, 1239 bp, Desulfovibrio desulfuricans subsp. desulfuricans str. G20
  CDS (1)..(1239): transl_table=11
atggacgaactgcttattcaggatccggaagtcggtcgcgccattgttcaggaagtggaacgtcagaccggcaagctggaactcatcgcctctgaaaactttgtgtcccccgcagtccgcgccgcacagggcagcgtgctgacccataaatacgccgaaggataccccggcaagcggtattacggcggttgcgaatttgtcgacgtggcggaaaacctcgccatcgaccgcgcctgcgaaatattcggcgcccagtacgccaacgtccagccccactccggcagccaggccaatatggccgtatacttttccgcgctgactcccggcgacaccattctggccatggatctgtcgcacggcggacacctgacccacggcagccccgtcaacttttcgggccggttctacaatgtggtgttctacggtgtctcgcgcgaaaccggctgcatagattatgacagcgtggcagaactggcacgcgagcaccgccccgccatgattgtggccggtgccagcgcctactcccgcatcatcgattttgcacggttccgcgccatagccgacgaagtgggttccctgcttatggtcgacatggcccacatagccggtctggtggccgccggtctgcatccttcccctgtgggcacggcgcacttcaccaccacaaccacgcacaaaaccctgcgcggtccgcgtggcggcatgattctgtcggacgaagaagccgccaaaaaactgaacagccagattttccccggcattcagggcggcccgctcatgcatgtcatcgccgccaaggctgtggccttcggcgaagcgctgcgtcccgaattcggcgcctaccagaagcaggtggtcgccaacgccgccaaactggccgccaccctgaccgatgccggttttgaactggtttccggcggcaccgacaaccacctgatgctggtggacctgacaaacaaggatatcaccggtaaagatgcccagcatgcgcttgaccttgcgggcatcaccgccaacaaaaacacggtgccttttgaaacccgctcgcctttcgtgacttcgggcatccggctgggtacccctgccctgaccacccgcggcatgaaagaagctgaaatggtcaaagtggccggctggataatcgacgcgctgggcaatatcggcaacgaaacccgtctggcggaaataagccgcgacgtggaaaagttcgcccgtcagttcccgctgttccactggtaa

SEQ ID NO: 10416 - protein, 412 aa, Desulfovibrio desulfuricans subsp. desulfuricans str. G20
MDELLIQDPEVGRAIVQEVERQTGKLELIASENFVSPAVRAAQGSVLTHKYAEGYPGKRYYGGCEFVDVAENLAIDRACEIFGAQYANVQPHSGSQANMAVYFSALTPGDTILAMDLSHGGHLTHGSPVNFSGRFYNVVFYGVSRETGCIDYDSVAELAREHRPAMIVAGASAYSRIIDFARFRAIADEVGSLLMVDMAHIAGLVAAGLHPSPVGTAHFTTTTTHKTLRGPRGGMILSDEEAAKKLNSQIFPGIQGGPLMHVIAAKAVAFGEALRPEFGAYQKQVVANAAKLAATLTDAGFELVSGGTDNHLMLVDLTNKDITGKDAQHALDLAGITANKNTVPFETRSPFVTSGIRLGTPALTTRGMKEAEMVKVAGWIIDALGNIGNETRLAEISRDVEKFARQFPLFHW

SEQ ID NO: 10417 - DNA, 1254 bp, Shigella dysenteriae Sd197
  CDS (1)..(1254): transl_table=11
atgttaaagcgtgaaatgaacattgccgattatgatgccgaactgtggcaggctatggagcaggaaaaagtacgtcaggaagagcacatcgaactgatcgcctccgaaaactacaccagcccgcgcgtaatgcaggcgcagggttctcagctgaccaacaaatatgctgaaggttatccgggcaaacgctactacggcggttgcgagtatgttgatatcgttgaacaactggcgatcgatcgtgcgaaagaactgttcggcgctgactacgctaacgtccagccgcactccggctcccaggctaactttacggtctacaccgcgctgctggaaccaggtgataccgttctgggtatgaacctggcgcatggcggtcacctgactcacggttctccggttaacttctccggtaaactgtacaacatcgttccttacggtattgatgctaccggtcatatcgactacgccgatctggaaaaacaagccaaagaacacaaaccgaaaatgattatcggtggcttctctgcatattccggcgtggtggactgggcgaaaatgcgtgaaatcgctgacagcatcggcgcttacctgttcgttgatatggcgcacgttgcgggcctggttgctgctggcgtctacccgaacccggttcctcatgctcacgttgttactaccaccactcacaaaaccctggcgggtccgcgcggcggtctgatcctggcgaaaggtggtagcgaagagctgtacaaaaaactgaactctgccgttttccctggtggtcagggcggtccgttgatgcacgtaatcgccggtaaagcggttgctctgaaagaagcgatggagcctgagttcaaaacttaccagcagcaggtcgctaaaaacgctaaagcgatggtagaagtgttcctggaacgcggctacaaagtggtttccggcggtactgataaccatctgttcctggttgatctggtagataaaaacctgaccggtaaagaagccgacgccgctctgggccgtgctaacatcaccgtcaacaaaaacagcgtaccgaacgatccgaagagcccgtttgtgacctccggtattcgcgtgggtactccggcgattacgcgtcgcggcttcaaagaagcagaagcgaaagaactggctggctggatgtgtgacgtgctggacagcatcaatgatgaagccgttatcgagcgtatcaaaggtaaagttctcgacatctgcgcacgttacccggtttacgcataa

SEQ ID NO: 10418 - protein, 417 aa, Shigella dysenteriae Sd197
MLKREMNIADYDAELWQAMEQEKVRQEEHIELIASENYTSPRVMQAQGSQLTNKYAEGYPGKRYYGGCEYVDIVEQLAIDRAKELFGADYANVQPHSGSQANFTVYTALLEPGDTVLGMNLAHGGHLTHGSPVNFSGKLYNIVPYGIDATGHIDYADLEKQAKEHKPKMIIGGFSAYSGVVDWAKMREIADSIGAYLFVDMAHVAGLVAAGVYPNPVPHAHVVTTTTHKTLAGPRGGLILAKGGSEELYKKLNSAVFPGGQGGPLMHVIAGKAVALKEAMEPEFKTYQQQVAKNAKAMVEVFLERGYKVVSGGTDNHLFLVDLVDKNLTGKEADAALGRANITVNKNSVPNDPKSPFVTSGIRVGTPAITRRGFKEAEAKELAGWMCDVLDSINDEAVIERIKGKVLDICARYPVYA

SEQ ID NO: 10419 - DNA, 1239 bp, Staphylococcus aureus RF122
  CDS (1)..(1239): transl_table=11
atgtcttatatcaccaagcaagataaagttatcgcagaagcaatcgagagagaatttcagagacaaaatagcaacatagagttaatcgcatcggaaaattttgtatcggaagcggttatggaagcacaaggttcagtgttgactaataagtatgctgaaggctatccaggacgccgatattatggtggctgtgagtttgtagatgttactgaaagcatcgcaattgatcgtgctaaagcattgtttggagctgaacatgtcaatgttcaaccacattcaggttcacaagcgaacatggctgtttacttagttgcattagaaatgggcgacacagttttaggtatgaatttgaggcatggtggtcacttgacacatggagcgcctgttaattttagtggtaaattctacaatttcgttgaatatggagtagataaagacacagaacgaatcaattatgatgaagttcgtaaattagcgttagagcataagcctaagcttattgtggcaggagcatcagcatattcaagaacaattgactttaaaaagtttaaagaaatcgcagatgaagtaaacgctaagttaatggtagacatggcacatattgcaggattagtagcggcaggtttacatccaaatccagtagaatatgctgattttgtaacaactacaacacacaaaacattacgcggaccacgtgggggtatgattttatgtaaggaagaatataaaaaagacatagataaaacaattttccctggtattcaaggtggacctcttgagcatgttattgcagcaaaagcagttgcttttggagaagcgttagaaaataatttcaaaacgtatcaacaacaagtggttaaaaacgcaaaagttcttgcagaagcattaattaatgaaggatttagaattgtttctggcggtacagataatcacttagtagctgttgatgtaaaagggtctataggacttactggtaaagaagctgaagagactttagattcagttggtatcacatgtaacaaaaataccattccgttcgatcaagaaaaaccttttgtaacgagtggtatacgtttaggtacacctgctgcaacaacgcgtggatttgatgaaaaagcttttgaggaagttgcaaaaatcatcagtttagcattgaaaaatagtaaagatgaagaaaaattacaacaagctaaagaacgcgttgcgaaattaacagctgaatatcctctatatcaataa

SEQ ID NO: 10420 - protein, 412 aa, Staphylococcus aureus RF122
MSYITKQDKVIAEAIEREFQRQNSNIELIASENFVSEAVMEAQGSVLTNKYAEGYPGRRYYGGCEFVDVTESIAIDRAKALFGAEHVNVQPHSGSQANMAVYLVALEMGDTVLGMNLRHGGHLTHGAPVNFSGKFYNFVEYGVDKDTERINYDEVRKLALEHKPKLIVAGASAYSRTIDFKKFKEIADEVNAKLMVDMAHIAGLVAAGLHPNPVEYADFVTTTTHKTLRGPRGGMILCKEEYKKDIDKTIFPGIQGGPLEHVIAAKAVAFGEALENNFKTYQQQVVKNAKVLAEALINEGFRIVSGGTDNHLVAVDVKGSIGLTGKEAEETLDSVGITCNKNTIPFDQEKPFVTSGIRLGTPAATTRGFDEKAFEEVAKIISLALKNSKDEEKLQQAKERVAKLTAEYPLYQ

SEQ ID NO: 10421 - DNA, 1284 bp, Magnetospirillum magneticum AMB-1
  CDS (1)..(1284): transl_table=11
atgtccagcgcacccaccgatgcctttttccgcactccgctttccgagcgtgatcccgaggtcttcgcggccatcacccaggaactgaagcgtcagcaggatcagatcgaactgatcgcctccgagaacatcgtgtcgcgcgcggtgctcgaggcgcagggctcggtcatgaccaacaaatacgccgagggttatcccggcaagcgctattacggcggctgcgagttcgtggacatcgccgaaagcctggccatctcccgcgcttgccagatcttcggttgctcttatgccaacgtccagcccagctcgggctcgcaggccaaccagggcgtgttcatggcgctgctgcagccgggcgacaccatcatgggcatgagtttggccgccggcggccacctgacccatggtgccgcccccaaccagtcgggcaagtggttcaaggccgtgcagtacggcgtgcgccagcaggattcccagatcgacttcgccgaggtggaggaactggcccgtacccacaggccgaagctgatcatcgccggtggctcggcctatccgcgcaccatcgacttcgcgcgtttccgcaagatcgccgacgaggtcggggccttcttcatggtggacatggctcacttcgccggtctggtggccggcggcgtgtatcccaatccgctgccccacgcccatgtggtgaccacgaccactcacaagaccctgcgcggcccgcgtggcggcatgatcctgtccaacgacgccgacatcggcaagaagatcaactcggccattttccccggcattcagggcggcccgctgatgcatgtcatcgccggcaaggcggtggcgttcggcgaggcgctgaagcccgagttcaagctttacgccaagcaggtcgtcgacaatgcccgcgccctggccgacaccctggtgcgccgtggcctggacatcgtgtcgggcggcaccgattcccacctgatgctggtggatttgcggcccaagaagctgaccggcaaggcggccgaggccagcctcgagcatgccggcatgacctgcaacaagaacggcattcccttcgacccggaaaagcccaccatcacctcgggcgtgcgtctgggcaccccggcggcgaccacgcggggcttcggcgtcgaggagttcaagaaggtgggcgaactgatcggtgacgtgctcgacggtctggccgccaatcccgaggacaactcggcggccgaggcccgtgcccgcgccgaagtagctgaactgtgccggcgcttcccgatctaccagtag

SEQ ID NO: 10422 - protein, 427 aa, Magnetospirillum magneticum AMB-1
MSSAPTDAFFRTPLSERDPEVFAAITQELKRQQDQIELIASENIVSRAVLEAQGSVMTNKYAEGYPGKRYYGGCEFVDIAESLAISRACQIFGCSYANVQPSSGSQANQGVFMALLQPGDTIMGMSLAAGGHLTHGAAPNQSGKWFKAVQYGVRQQDSQIDFAEVEELARTHRPKLIIAGGSAYPRTIDFARFRKIADEVGAFFMVDMAHFAGLVAGGVYPNPLPHAHVVTTTTHKTLRGPRGGMILSNDADIGKKINSAIFPGIQGGPLMHVIAGKAVAFGEALKPEFKLYAKQVVDNARALADTLVRRGLDIVSGGTDSHLMLVDLRPKKLTGKAAEASLEHAGMTCNKNGIPFDPEKPTITSGVRLGTPAATTRGFGVEEFKKVGELIGDVLDGLAANPEDNSAAEARARAEVAELCRRFPIYQ

SEQ ID NO: 10423 - DNA, 1281 bp, Hahella chejuensis KCTC 2396
  CDS (1)..(1281): transl_table=11
atgtttaccgaagatatgcggatcgctgattacgatcccgagctgtcggcggccattaatgcggaaaagcgccgtcaggaagaacacattgaattgatcgcctccgaaaactacgtcagcccgcgggtgatggaagcgcaaggcggcgtcttgaccaacaaatacgcggaaggctatcccggcaagcgttactacggcggctgcgagcacgtcgacgttgcggagcaattggccatcgaccgcgccaagcaactgttcggcgctgattacgccaacgtgcaaccccattctggatcacaggccaacgctggcgtgtatctggccctggccaagcctggcgacaccattctgggcatgagcctggaccacggcggtcatctgacccacggcgccaagcccaacttctccggcaaaattttcaacgccgtgcagtacggtctgaacccggaaaccggtgaaatcgactacgatcaggttgagcgtctggccaaagagcacaagccgaagctggttattgcgggtttctcagcttattcgcgagtggtggactggcagcgtttccgtgacattgcggacagtgttggcgcgtacctgatcgttgatatggcgcacgtcgcgggtcttgtcgcggcgggtctgtatccaagcccggtgcaaatcgccgacgtcaccacgactaccacgcacaaaaccttgcgcggcccacgcggcggtctgattttggcgaaatccaacccagagattgagaagaaactgcaatctttgattttccctggcattcagggcggtcctctgatgcacgtaatcgcagcgaaggcggtagcgtttaaagaggcgttggagccggcgttccgcgactatcagcagcaggtcgtgaataacgccagagccatggcggacgctgtgaaggcgcgcggctacaaagtcgtcagcggcggtacggataaccaccttttcctgatcgacctgatcgataagggcgtaaccggtaaagacgccgacgccgcattgggtcgggcttacattaccgttaacaagaatacggtgccgaatgatccgcagtcgccgttcgtaacttccggtctgcgcatcgggacgccaggcgtcaccactcgcggctttaaagaaaaagaagtcgtagagctggcgaactggatttgcgatgtgctggacaatatgggcgatgaaagcgtcgtagagaaagtccgtgagaaggtgctgagcatctgccgcgacttccctgtctaccgcgccaacgccaaatccggagccgccctgtga

SEQ ID NO: 10424 - protein, 426 aa, Hahella chejuensis KCTC 2396
MFTEDMRIADYDPELSAAINAEKRRQEEHIELIASENYVSPRVMEAQGGVLTNKYAEGYPGKRYYGGCEHVDVAEQLAIDRAKQLFGADYANVQPHSGSQANAGVYLALAKPGDTILGMSLDHGGHLTHGAKPNFSGKIFNAVQYGLNPETGEIDYDQVERLAKEHKPKLVIAGFSAYSRVVDWQRFRDIADSVGAYLIVDMAHVAGLVAAGLYPSPVQIADVTTTTTHKTLRGPRGGLILAKSNPEIEKKLQSLIFPGIQGGPLMHVIAAKAVAFKEALEPAFRDYQQQVVNNARAMADAVKARGYKVVSGGTDNHLFLIDLIDKGVTGKDADAALGRAYITVNKNTVPNDPQSPFVTSGLRIGTPGVTTRGFKEKEVVELANWICDVLDNMGDESVVEKVREKVLSICRDFPVYRANAKSGAAL

SEQ ID NO: 10425 - DNA, 1257 bp, Hahella chejuensis KCTC 2396
  CDS (1)..(1257): transl_table=11
atgtttacgcgtgacatgaccatcgcaagttttgatcctgatctttggaccgccatgcaaggtgaaacccagcgtcaggaagagcacatagagctgattgcatctgaaaactacaccagtccacgcgttatggaagcccagggctccgcgcttaccaacaagtatgcggaaggttatcccaacaagcgctattacggcggttgtgaatatgttgatgtggttgagcaactggctatcgaccgcgccaaagagctgttcggcgctgattacgccaacgtgcagccgcattctggctctcaggcgaacgcagcggtatacatggcgctttgcaaacccggcgatgtgattcttggcatgagtctggcccatggcggccacttgacgcacggcgcctccgtcagcttttctgggcgtatctacaaagcggtgcagtacggcttgaatccagaaaccggtgagattgattacgaagaagtcgccaagctggcgcgcgaaaataagcccaagatgatcgtggcgggcttttctgcatactcgcgagtcattgattgggaacgcttccgcgctatcgcggatgaagtgggcgcatacttgtttgtcgatatggcccatatcgccggtttggtggcggcgggcgtatatcccagcccagttcagatcgcagacgtcactacgactacgactcacaaaaccttaggcggcccccgcggcggtctgattctcgctaaagccaacgaagagttggaaaagaaactgaacttcgcagtcttcccagaaagtcagggtggtcctttgatgcatgtgatcgctgcgaaagcggtttgcttcaaagaagcgatgactgacgaattcaagcaatatcaggcgcaagtagttaaaaacgcccgggttatggcggacacttttattcagcgcggatatgacattgtttccggtggtacggacgaccatttgttcctggtcgacctgatcaagaaagatatcaccgggaaagatgctgacgcagcattgggacgcgccaacattactgtgaataaaaacgcggtgcctaatgatcctcgctcaccattcgtcaccagcggcttacgcattggtacgcctgctattacccgtcgcggcatgggcgaagtagaagccaaagagctgacagattggatctgcgacgtgctggacgatatcgaaaacgaagagacgatccagcgcgttaagcagcaagtactggagctgtgcaaaaagttcccagtatacaaaggataa

SEQ ID NO: 10426 - protein, 418 aa, Hahella chejuensis KCTC 2396
MFTRDMTIASFDPDLWTAMQGETQRQEEHIELIASENYTSPRVMEAQGSALTNKYAEGYPNKRYYGGCEYVDVVEQLAIDRAKELFGADYANVQPHSGSQANAAVYMALCKPGDVILGMSLAHGGHLTHGASVSFSGRIYKAVQYGLNPETGEIDYEEVAKLARENKPKMIVAGFSAYSRVIDWERFRAIADEVGAYLFVDMAHIAGLVAAGVYPSPVQIADVTTTTTHKTLGGPRGGLILAKANEELEKKLNFAVFPESQGGPLMHVIAAKAVCFKEAMTDEFKQYQAQVVKNARVMADTFIQRGYDIVSGGTDDHLFLVDLIKKDITGKDADAALGRANITVNKNAVPNDPRSPFVTSGLRIGTPAITRRGMGEVEAKELTDWICDVLDDIENEETIQRVKQQVLELCKKFPVYKG

SEQ ID NO: 10427 - DNA, 1299 bp, Salinibacter ruber DSM 13855
  CDS (1)..(1299): transl_table=11
atgagtgcgctccgcaaccaagatcccgaaatccacgacgtcatccagaaggaggtccagcgccagaacgacgggctggagctcattgcgtccgaaaacttcgcctcccgggccgtcatggaggcgatgggcacggcccttacgaacaagtacgcggagggcctgccgggcaagcgctactacggcggatgcgaggtggtcgaccgggccgaggaactggcccgcgagcgggcgaaagagctctacgactgcgactgggtgaacgtgcagccgcacgcgggggcccaggccaactccgcggtgtatctgaccctcctggaccccggcgacaccttcctcgggctcgacctgtcgcacggcggccacctcacgcacggatcgcccgtcaacttctccggcattctttacgaggccgagtactacggggtggaggaggagaccggccgcatcgacatgaacagggtgcgcgaccgggcgaaggaggtgcagccgaagatgatctcgatcggggccagtgcctacccgcgcgacttcgactacgaggccttccgcgagatcgccgacgaggtcggcgcgttcctgtggatggacatggcgcacacggcggggctcattgcgggcggggtcctgaacgacccgatgccgcacacccacgtggtgaccaccaccacccacaagacgctccggggcccccgtggcggcatgattcttctgggcgacgactacgagaacccgatgggcaagacggcccgcaagagcgggcgcacgaagatgatgagcgagctgctcgactcggccgtctttcccggcacgcagggcggcccgttgatgcacgtgatcgccgcgaaggccgtcggcttcaaggaggccctcaagccctcgttcgccgagtacacccagcaggtcgtcgataacgcgcaggcaatgggcgccgagctccgcgagcggggctacgacctcgtctccgacgggacggacaaccacctcgtcctcatcgacctgcgcaacaaggggctcaccggcaaggaggccgagcaggccctcgaagcggccggcattacggccaacaagaacatggtgccgttcgacgacaagagcccgttcgtcacgagcgggctgcgcctgggaacgcccgcaatgaccacccgcgggttcgggccggatgagtttgcccacgtggcggagatgatcgaccgggtccttcaggatcccgaggatgaggacacgcaggcagcggtggaacgggaggtgaaggccctctgcgaccagcacccgctgtacgatgtcgctatggcgtag

SEQ ID NO: 10428 - protein, 432 aa, Salinibacter ruber DSM 13855
MSALRNQDPEIHDVIQKEVQRQNDGLELIASENFASRAVMEAMGTALTNKYAEGLPGKRYYGGCEVVDRAEELARERAKELYDCDWVNVQPHAGAQANSAVYLTLLDPGDTFLGLDLSHGGHLTHGSPVNFSGILYEAEYYGVEEETGRIDMNRVRDRAKEVQPKMISIGASAYPRDFDYEAFREIADEVGAFLWMDMAHTAGLIAGGVLNDPMPHTHVVTTTTHKTLRGPRGGMILLGDDYENPMGKTARKSGRTKMMSELLDSAVFPGTQGGPLMHVIAAKAVGFKEALKPSFAEYTQQVVDNAQAMGAELRERGYDLVSDGTDNHLVLIDLRNKGLTGKEAEQALEAAGITANKNMVPFDDKSPFVTSGLRLGTPAMTTRGFGPDEFAHVAEMIDRVLQDPEDEDTQAAVEREVKALCDQHPLYDVAMA

SEQ ID NO: 10429 - DNA, 1254 bp, Sodalis glossinidius str. 'morsitans'
  CDS (1)..(1254): transl_table=11
atgttaaagcgtgatatgaacattgcggattatgatgccgaattgtggcatgcaatggagcaggaagtagtgcgccaggaagagcacattgaactgattgcatctgaaaactacaccagtccgcgcgttatgcaggcgcagggctcacagctgaccaataagtacgctgaaggctaccccggcaagcgctactacggcggatgcgaatatgtcgatgtggtagagcaactggccatcgatcgtgccaaagccctgttcggcgccgattatgccaacgtgcagcctcactcgggctctcaggccaacttcgccgtttataccacgttgctgcagccgggcgatacggtgctgggtatgaacctggcacacggcggccatttgactcacggctcgccggtcaacttctccggcaagctgtataatatcgtaccttacggcatcgatgagagcggtcatatcgattatgaccaattggccgagctggcgaaaactcatcagccgaaaatgatcatcggtggcttctccgcctactccggggtggttgactgggccagaatgcggcagattgccgatagcatcggcgcctatttgtttgtagatatggcacacgtggcgggtcttattgccgccggcgtgtatccgaacccggtgccccacgcccacgttgtgactacaaccacccacaaaactctggccggtccgcgtggtggtttgatcctggccaagggcggtagcgaagagctgtataaaaagctgaattctgccgtattccccggcgcgcaaggtggcccgttgatgcatgtgattgccgccaaggcagttgcgctgaaagaggcgatggagccggcgtttaaaacctaccagcagcaggtggccaaaaacgctaaagccatggtagaggttttcttgtcacgcggtttcaacgttgtctccggcgctacggataatcacctgttcctgctggatctggtggataagaatctgaccggcaaagaagcggatgcggccttgggccgtgccaatattaccgttaataaaaacagcgtgcccaatgatccgaaaagcccgttcgtcacctccgggatgcgtatcggtacgccggcggtgacgcgtcgcggttttaccgaggccgacgtgcgcgatttggcgggttggatgtgtgacgtgttggaaaatatccatgacgacgccgtaatcgagcgcactaagaataaagtgctggatatctgcgaccgccatcctgtttacgcgtga

SEQ ID NO: 10430 - protein, 417 aa, Sodalis glossinidius str. 'morsitans'
MLKRDMNIADYDAELWHAMEQEVVRQEEHIELIASENYTSPRVMQAQGSQLTNKYAEGYPGKRYYGGCEYVDVVEQLAIDRAKALFGADYANVQPHSGSQANFAVYTTLLQPGDTVLGMNLAHGGHLTHGSPVNFSGKLYNIVPYGIDESGHIDYDQLAELAKTHQPKMIIGGFSAYSGVVDWARMRQIADSIGAYLFVDMAHVAGLIAAGVYPNPVPHAHVVTTTTHKTLAGPRGGLILAKGGSEELYKKLNSAVFPGAQGGPLMHVIAAKAVALKEAMEPAFKTYQQQVAKNAKAMVEVFLSRGFNVVSGATDNHLFLLDLVDKNLTGKEADAALGRANITVNKNSVPNDPKSPFVTSGMRIGTPAVTRRGFTEADVRDLAGWMCDVLENIHDDAVIERTKNKVLDICDRHPVYA

SEQ ID NO: 10431 - DNA, 1290 bp, Aster yellows witches'-broom phytoplasma AYWB
  CDS (1)..(1290): transl_table=11
atgcccaaaaatacaaaaagaaaaaggttgtgcccaaaaatgaatcaaaagttaggattaaaagaccaagatcaagaaatctttgatcttattgaacaagaaaaagctagacaaaaagaaaatatcttattaattgcttctgaaaattttgtttctcaagcagtattagacgcccaaggaagtattttgaccaacaaatatgcagaaggctatcctcaagctagatattataatggttgtaaaaatgtagatcaaatagaaaaaatcgccattcaaagagcaaccaagttgtttggtgctaaatatgcaaatgtccaacctcattcaggctcacaagcaaatatgggagtatttcaagctttattaaaacctggtgataaaattttaggattatctttaatggatggaggacatcttactcacggtcataaattaagtttttctggtggattttacgaagctcatttttataatgtcaatccccaaactgaaatgcttgattatgatgaaattcgtaaagttgccttagcagttaaacctaaattaattattgcaggatattcagcttattctaaaactattaattttaaaaagtttcgtcaaattgctgatgaagtaaatgcatatttaatagcagatattgcccatattgcaggtttagttgcttgtggtcttcatccttgtccctttgaagctaatgccgatgttgttacttctactatgcacaaaacgctgagaggaccgcgtggaggtttgattttaactaataaagaagaattatttaaaaaaattaatcgtggcatttttcctggtattcaaggaggaccttgcattcatactattgctgctaaagctgttgcttttcaagaagctatgatgccttcatttaaagaatatcaaaagcaagttatcaaaaatgcaaacacctttgctaaagccttccaacaaaaaggttatcgcattgtaagtggaagcactgacaatcatttatttctaattgatgttaaacataaaaatactgagtttacaggagccaaaatcgcaaacatgttagaaaaaataaatattgttgtcaataaaaatactattccttttgatcaagaaaaaccttttgtaacaagtggtattagaattggcacacctgctatgacaacagtagggtttagagaaaatgattttgttgcagttgcagatttgatggacaaagctatcaatcacttggacgatgagtcttatttatcccaaattaaacaacaagttttggctttattaagtaagtttaataaataa

SEQ ID NO: 10432 - protein, 429 aa, Aster yellows witches'-broom phytoplasma AYWB
MPKNTKRKRLCPKMNQKLGLKDQDQEIFDLIEQEKARQKENILLIASENFVSQAVLDAQGSILTNKYAEGYPQARYYNGCKNVDQIEKIAIQRATKLFGAKYANVQPHSGSQANMGVFQALLKPGDKILGLSLMDGGHLTHGHKLSFSGGFYEAHFYNVNPQTEMLDYDEIRKVALAVKPKLIIAGYSAYSKTINFKKFRQIADEVNAYLIADIAHIAGLVACGLHPCPFEANADVVTSTMHKTLRGPRGGLILTNKEELFKKINRGIFPGIQGGPCIHTIAAKAVAFQEAMMPSFKEYQKQVIKNANTFAKAFQQKGYRIVSGSTDNHLFLIDVKHKNTEFTGAKIANMLEKINIVVNKNTIPFDQEKPFVTSGIRIGTPAMTTVGFRENDFVAVADLMDKAINHLDDESYLSQIKQQVLALLSKFNK

SEQ ID NO: 10433 - DNA, 1254 bp, Syntrophus aciditrophicus SB
  CDS (1)..(1254): transl_table=11
atgtcagctttaatgaaaaccgatcctgaaatagccgaggccatccgtcttgaaacccggaggcaggcgggaaaactggaactcatcgcgtcggaaaactttgtcagcgaggctgttctcgaagcccagggatgcatcatgaccaacaagtacgcggaaggatatcccggaaaacgatactatggcggctgtgaatatgtcgacatcgcggaaaatctggcgatcgaacggtgcaaggcgctgttcggcgcggattacgtcaacgtccagcctcactcgggcacccaggccaacatggcggtttatttttccgccctttccgtgggggataccatcctggggatgaatctcgctcatggcgggcacttgtctcacggcagtccggccaacttctccggcaagttctacaatgtggtcccttacggcgtagaccgggaaacggaaacgatcgattacaaccaagtggaagacctcgccctgcagcacaaacccaggatgatcgtcgtcggcgccagcgcctatccccggaccatcgatttcgagaagttccgggccattgcggataaagtcggcgctctcgtcatggccgacatcgcacacatcgccggtctggtggcgacgggtctgcacccctctcctgtccccgtctgcgaatacgtcacctcgacgacccataaaaccctccgtggcccccgcgggggcttggtcatgtgccaggcgtcctaccagaaaacgctcagcagccgggtctttcccggtgttcagggcggtccactgatgcatatcatcgccgccaaagcggtggccttcaaggaagcccttacggatgaattcaaggattaccagagccagatcgtgaagaacgcccaggcgctggccaaagagctgatcggccggggatatcgcctcgtttccggggggacggacaaccatcttcttcttatggatttgaccgacaagggtctgacaggaaaggaagcgcaggaatcgctggattcggcgggaataactgtcaacaagaacggcatccccttcgacacccggggtcccatggtgaccagcggaatccggatcggcacgcccgccctgaccagccggggaatgaaggaagaagaaatgcggacgatagcccgcctgattgccgaggttctcgaacatcgggacaacgaaaaacatctgatggctgtcaaagaggaggtcggccggctctgtcaaaatttccccctttatgccgagcggatcgcgagcgcatga

SEQ ID NO: 10434 - protein, 417 aa, Syntrophus aciditrophicus SB
MSALMKTDPEIAEAIRLETRRQAGKLELIASENFVSEAVLEAQGCIMTNKYAEGYPGKRYYGGCEYVDIAENLAIERCKALFGADYVNVQPHSGTQANMAVYFSALSVGDTILGMNLAHGGHLSHGSPANFSGKFYNVVPYGVDRETETIDYNQVEDLALQHKPRMIVVGASAYPRTIDFEKFRAIADKVGALVMADIAHIAGLVATGLHPSPVPVCEYVTSTTHKTLRGPRGGLVMCQASYQKTLSSRVFPGVQGGPLMHIIAAKAVAFKEALTDEFKDYQSQIVKNAQALAKELIGRGYRLVSGGTDNHLLLMDLTDKGLTGKEAQESLDSAGITVNKNGIPFDTRGPMVTSGIRIGTPALTSRGMKEEEMRTIARLIAEVLEHRDNEKHLMAVKEEVGRLCQNFPLYAERIASA

SEQ ID NO: 10435 - DNA, 1320 bp, Jannaschia sp. CCS1
  CDS (1)..(1320): transl_table=11
atgaacgccccccatcgcgacgagacaaccgcgtcccacagagacgacggatttttcactgaaagcctggagtcccgcgatcccgagatcttcgccgcctcgcaaaaagagctgggacgccagcgcgacgagattgagctgatcgcgtcggagaacatcgtgtcggccgccgtgatggaagcccagggcggcgtgatgaccaacaaatacgccgagggatatccagggcggcgctattatggtggctgccaatacgttgatatcgcagaggaattggcgattgatcgcgccaagcagctgttcgggtgcgacttcgccaacgtacagcccaactccgggtctcaggcaaaccagggcgtgttcacggccctgctgcaacccggcgacacgatcctcggcatgagccttgatgccggcggccacctcacccacggtgcacgccccaaccaatcgggcaagtggttcaacgccgtgcaatacggggtgcgtgaaggcgatctggagatcgactatgaccagatcgcggcgctggccgctgagcacaagcccaagatgatcatcgcaggcggctctgccattccgcggatcatcgattttgcccgcatgcgcgagattgccgacacgattggcgcatatctccttgtggacatggcacatttcgcaggaatggttgcgtccggccattacccgtcgcccttcccccacgcccatgtggcaacgaccacgacgcacaaaaccctgcgtggcccgcgcggtggcatgatcgtcacgaacgatgaggcgatcgccaagaaggtgaattccgcgattttccccggtatccagggcggtcccctgatgcatgtgattgccggtaaggctgtcgcgttcggcgaggcgctgcgccctgaattcagggattatcagacgcaggtgatcgccaacgcacaagcgctggcagcgcagttgattaagggcggtctggacatcgttaccggcggcaccgacacgcatttgatgctggtggatctgcgcgccaaaggcgttaagggcaacgcgactgaaaaggccctgggccgtgcccacatcacctgcaacaagaacggcatccccttcgacaccgaaaagccgatggtcacatccggtttgcgcctgggctcccccgccgggaccacccgcgggtttggcgaggcggagttccgccagatcgccgattggatcgtggaggtcgtcgatggcctcgcggccaatggggaggacgccaatgacgcggtcgaagccaaggtccggggggaggtgcaggcgctttgtgaccgcttcccgatctatccgaacctgtga

SEQ ID NO: 10436 - protein, 439 aa, Jannaschia sp. CCS1
MNAPHRDETTASHRDDGFFTESLESRDPEIFAASQKELGRQRDEIELIASENIVSAAVMEAQGGVMTNKYAEGYPGRRYYGGCQYVDIAEELAIDRAKQLFGCDFANVQPNSGSQANQGVFTALLQPGDTILGMSLDAGGHLTHGARPNQSGKWFNAVQYGVREGDLEIDYDQIAALAAEHKPKMIIAGGSAIPRIIDFARMREIADTIGAYLLVDMAHFAGMVASGHYPSPFPHAHVATTTTHKTLRGPRGGMIVTNDEAIAKKVNSAIFPGIQGGPLMHVIAGKAVAFGEALRPEFRDYQTQVIANAQALAAQLIKGGLDIVTGGTDTHLMLVDLRAKGVKGNATEKALGRAHITCNKNGIPFDTEKPMVTSGLRLGSPAGTTRGFGEAEFRQIADWIVEVVDGLAANGEDANDAVEAKVRGEVQALCDRFPIYPNL

SEQ ID NO: 10437 - DNA, 1245 bp, Rhodoferax ferrireducens T118
  CDS (1)..(1245): transl_table=11
atgtacaaccgtaacatcctcatcgaacaaaccgaccccgaaatttttgccgctattgcagcggaaaacgcccgccaggaacagcacatcgagctgatcgccagcgaaaactacgcctcacccgccgtcatggccgcgcagggcacgcaactgactaataagtatgctgaaggctaccccggcaaacgctactacggcggttgcgagtttgtggacattgccgagcaactggccattgaccgcgtcaagcaaatctttggcgccgatgccgccaacgtgcaaccccattgcggcgcgtccgccaacgaggcggtgtttctggcctttttgaaacccggcgataccatcatgggcatgagcctggctgaaggcggccacctgacgcacggcatggcactgaacatgagtggcaagtggttcaacgtcgtcagctacggcctgaacgacaaggaagagattgactacgacgccatggagcgaaaagcccatgagtccaaacccaaactgatcatcgccggtgcctccgcctacagcctgcgcatcgactttgctcgctttgccaaggtcgccaaagacgtgggcgccatctttatggtggacatggcgcactacgccggcctgattgccgccggcatctaccccaaccccgtgccacacgctgacgtggtgaccagcaccacccacaaaagcctgcgcggcccgcgaggcggcatcattttgatgaaagcgcagcacgagaaagccatcaacagcgccatcttccccggcctgcaaggtggcccgctgatgcatgtgattgcggccaaggcggtggcgttcaaagaagcgctacagcccgagttcaaggtctatcagcaacaagtgttgaccaacgcccgcgtcgtggctgaaacgctggtgtcgcgcggcctgcgcattgtgagtggccgcactgaaagccacgtcatgctggtcgatctgcgctccaaaagcatcactggcaaagaagctgaagcggtactgggcagcgcccacatgaccatcaacaaaaatgccatccccaatgaccctgaaaaacccatggtcaccagcggcgtgcgcatcggtaccccggccatgacgacccgcggcttcaaggacgaagaagcccgcattactgcaaatttgatagcagatgtactagataatccgagggatagcgccaatattgatgcagtacgcgccaaggtcaacgcactaaccaaacgcttccctgtttatggataa

SEQ ID NO: 10438 - protein, 414 aa, Rhodoferax ferrireducens T118
MYNRNILIEQTDPEIFAAIAAENARQEQHIELIASENYASPAVMAAQGTQLTNKYAEGYPGKRYYGGCEFVDIAEQLAIDRVKQIFGADAANVQPHCGASANEAVFLAFLKPGDTIMGMSLAEGGHLTHGMALNMSGKWFNVVSYGLNDKEEIDYDAMERKAHESKPKLIIAGASAYSLRIDFARFAKVAKDVGAIFMVDMAHYAGLIAAGIYPNPVPHADVVTSTTHKSLRGPRGGIILMKAQHEKAINSAIFPGLQGGPLMHVIAAKAVAFKEALQPEFKVYQQQVLTNARVVAETLVSRGLRIVSGRTESHVMLVDLRSKSITGKEAEAVLGSAHMTINKNAIPNDPEKPMVTSGVRIGTPAMTTRGFKDEEARITANLIADVLDNPRDSANIDAVRAKVNALTKRFPVYG

SEQ ID NO: 10439 - DNA, 1263 bp, Saccharophagus degradans 2-40
  CDS (1)..(1263): transl_table=11
atgtttgataccaagcaaacactcgacgcattcgacccagaaatttggcaatccatccaagatgaagcccagcgtcaagaagagcatattgagttaattgcttcagaaaactacaccagcccaatggtgatggaagcccaaggcaccaagcttactaacaaatatgcagaagggtacccaggcaagcgctactacggtggttgtgagtatgtagacaaagccgaagcattggctattgagcgtgcaaaaaccttgtttggtgcagattacgccaacgtacagccgcactctggttcgcaagctaactcggctgtttacgccgcattgtgttcacctggcgataccgtattaggcatgagcttggcgcacggtggtcacttaacgcacggtgcttccgttagcttctctggcaaaatgtacaacgcggtacagtacggcattaacccagatactggtttagtcgattacgaagaaattgctaacttggcgcgtgagcacaagccaaaaatgattgttgctggtttctcggcctatagccaagtactagattggcagaaattccgcgatatcgccgacgaagtaggcgcttacttaatggttgatatggctcacgttgctggtcttgttgccgctggtgtatacccatcacctgtgcaaattgccgatgtaactacctccactacccacaaaacattacgtggtccacgcggtggtattatccttgccaaagccaacccagagatagaaaagaaattaaactctgcggtattccctggcggtcaaggtggcccattgatgcacgtcattgcggctaaagcgattagctttaaagaggccatgaccgacgagtacaaagcgtatcaaaaacaagttgttgctaacgcaaaagccatggctgcaacattcaatgagcgcggcattaaaattgtatctggcggaaccgaaaaccaccttatgttggtagacttaatcggtaaagaatacaccggtaaagatgccgatgccgctttgggtgcagcgtacattaccgtaaacaaaaatgcggtacctaacgacccacgctcaccgtttgtaaccagcggtttacgcgttggtaccccggctgtaactacccgtggttttaaagagaagcagtgtatagaccttactaactggatttgcgacgtactagaaagcttagaaaacggcaattcagagcaagtaattgcagatgtaaaagcaaaagtattggctgtttgtgctgagttcccagtttacaaataa

SEQ ID NO: 10440 - protein, 420 aa, Saccharophagus degradans 2-40
MFDTKQTLDAFDPEIWQSIQDEAQRQEEHIELIASENYTSPMVMEAQGTKLTNKYAEGYPGKRYYGGCEYVDKAEALAIERAKTLFGADYANVQPHSGSQANSAVYAALCSPGDTVLGMSLAHGGHLTHGASVSFSGKMYNAVQYGINPDTGLVDYEEIANLAREHKPKMIVAGFSAYSQVLDWQKFRDIADEVGAYLMVDMAHVAGLVAAGVYPSPVQIADVTTSTTHKTLRGPRGGIILAKANPEIEKKLNSAVFPGGQGGPLMHVIAAKAISFKEAMTDEYKAYQKQVVANAKAMAATFNERGIKIVSGGTENHLMLVDLIGKEYTGKDADAALGAAYITVNKNAVPNDPRSPFVTSGLRVGTPAVTTRGFKEKQCIDLTNWICDVLESLENGNSEQVIADVKAKVLAVCAEFPVYK

SEQ ID NO: 10441 - DNA, 1263 bp, Rickettsia bellii RML369-C
  CDS (1)..(1263): transl_table=11
atgaacatttttaataataaattacaagaaatagataaaggaattttcgaaataattaagcatgaaaaaacccgtcaaaatagtgtgattgagcttattgcctctgagaatttcgtaagtcctgcggtgcttgaagctcaaggatcggtactaactaataaatatgctgaaggatattcaggtaagcgtttttataatggctgtgaagaagtagataaagccgaaaatttggcgatagagcgagcaaaaaagctatttaactgtaaatatgccaacgtgcaacctcattccggttcgcaagcaaatcaagctgtataccttgctttaatgcagccgggtgatactgtacttggtatgtctttagatagcggtgggcatttaacgcatggctcaactgctaatatgtcaggtaagtggtttaatgcagtttcttatagcgtcgataaagagacttacttaattgattatgatgaagttgaacgcttagcaattttacacaaaccaaaattgcttatagctggtttttcagcttacccacgcaatcttgattttgctaaattcagagaaatagctgataaggtaggagcatatcttatggctgatattgctcatattgcggggttagttgcggcaggtgagcatcaaagccctattccacacgctcatattgttacctcaactaccaataaaacacttagaggaccaaggggtggcttaattttgtctaacgatgaagagataggcaaaaaaataaattctgctttattcccgggtttgcaaggtggtccattaatgcatataatagcagcaaaagctgtagcatttttagaaagcttgcagccggaatataaaagctatataaaacaagttataattaatgccaaagctttagccggtagcctgcaagagcgaggatatgatatattaacaggtggcactgataatcatattgtgctagtggatttacgaaaagacggcattaccggtaaaattgctgctaattctttagatagagcaggtattacttgcaataaaaatgctattccttttgataaaacttcgccttttattacttcaggtattaggcttggcacaccagcttgcactactagagggtttaaggaaaaagattttgtgctagttggtcatttaatagctgatattttagatggcttaaagaatagcgaagataatagcaaagctgagcagaaagtgttaagcgaagtaacaaaattaattaaattatttccgttttatgactaa

SEQ ID NO: 10442 - protein, 420 aa, Rickettsia bellii RML369-C
MNIFNNKLQEIDKGIFEIIKHEKTRQNSVIELIASENFVSPAVLEAQGSVLTNKYAEGYSGKRFYNGCEEVDKAENLAIERAKKLFNCKYANVQPHSGSQANQAVYLALMQPGDTVLGMSLDSGGHLTHGSTANMSGKWFNAVSYSVDKETYLIDYDEVERLAILHKPKLLIAGFSAYPRNLDFAKFREIADKVGAYLMADIAHIAGLVAAGEHQSPIPHAHIVTSTTNKTLRGPRGGLILSNDEEIGKKINSALFPGLQGGPLMHIIAAKAVAFLESLQPEYKSYIKQVIINAKALAGSLQERGYDILTGGTDNHIVLVDLRKDGITGKIAANSLDRAGITCNKNAIPFDKTSPFITSGIRLGTPACTTRGFKEKDFVLVGHLIADILDGLKNSEDNSKAEQKVLSEVTKLIKLFPFYD

SEQ ID NO: 10443 - DNA, 1245 bp, Polaromonas sp. JS666
  CDS (1)..(1245): transl_table=11
atgtaccatcgcaatattctggtcgaacagaccgaccccgaaattttcgctgccatccaggctgaaaacgcccggcaggaacaccacatcgagctgattgccagcgagaactacgcctcgcccgccgtcatggcagcccaaggctcgcagctcaccaataaatacgccgaaggctaccccggccgccgttattacggtggttgcgagtatgtggacgtggcggagcagctggcgattgaccgcatcaagcagatttttggcgcggatgccgccaatgtgcagccgcattgcggcgcttccgccaatgaggcggtgtttcttgccttcctgaagcccggcgacaccatcatggggatgagcctggccgaaggcggtcacctgacccacggcatggcactcaacatgagcggcaagtggtttaacgttgtctcctacggactcaacgacaaggaagagatcgactacgacgcgatggagcgcaaggcgcacgagacccgccccaagctcatcatcgccggcgcctcggcctacagcctgcgcatcgatttcgagcgttttgccaaagtcgccaaagccgtaggcgccatcttcatggttgacattgcgcactacgcgggcctggttgctgcgggcgtgtacccgaacccggtgccgcacgccgacgtcgtgacgtccactacgcacaagagcctgcgcggcccgcgcggcggcatcatcctgatgaaagccgagcacgagaaagccatcaacagcgcgatcttccccggcctgcagggtggcccgctgatgcacgtgattgccgcgaaggcggtggctttcaaggaagcgctctcccccgaattcaagacatatcagcagcaggtgctgacgaacgcgcgcatcgtggccgaaacgctgacgcaacgcggtttgcgtattgtcagcggccgaacagagagccacttgatgctggtcgacctgcgcgccaagggaatcaccggcaaggaagctgaagccgtactgggaagcgcccacatgactatcaataaaaacgcgattccgaatgacccggaaaagccgatggtcaccagtggcgtgcgcatcggtacaccagcgatgaccacgcgcggcttcaaggacgaagaggcacgcgtcacggccaacctgattgcagatgtgctggacaacccccgcgatgccgccaatatcgaagcggttcgcgccaaggtcaatgccctgaccagccgcttccctgtttaccgctga

SEQ ID NO: 10444 - protein, 414 aa, Polaromonas sp. JS666
MYHRNILVEQTDPEIFAAIQAENARQEHHIELIASENYASPAVMAAQGSQLTNKYAEGYPGRRYYGGCEYVDVAEQLAIDRIKQIFGADAANVQPHCGASANEAVFLAFLKPGDTIMGMSLAEGGHLTHGMALNMSGKWFNVVSYGLNDKEEIDYDAMERKAHETRPKLIIAGASAYSLRIDFERFAKVAKAVGAIFMVDIAHYAGLVAAGVYPNPVPHADVVTSTTHKSLRGPRGGIILMKAEHEKAINSAIFPGLQGGPLMHVIAAKAVAFKEALSPEFKTYQQQVLTNARIVAETLTQRGLRIVSGRTESHLMLVDLRAKGITGKEAEAVLGSAHMTINKNAIPNDPEKPMVTSGVRIGTPAMTTRGFKDEEARVTANLIADVLDNPRDAANIEAVRAKVNALTSRFPVYR

SEQ ID NO: 10445 - DNA, 1248 bp, Burkholderia xenovorans LB400
  CDS (1)..(1248): transl_table=11
atgtttgacagagcccaaagcaccatcgccaacgtcgatcctgaactctggaaggtcatcgagcaggaaaaccgccgtcaggaagagcacatcgaactgatcgcgtcggaaaactacacgagcccggctgtcatggctgcgcaaggctcgcaactcacgaacaagtacgccgaagggtatccgggcaagcgctattacggcggttgcgagtacgtggacatcgccgagcagctggcgatcgaccgtgtgaagcaactgttcggcgccgaagccgccaacgtgcagccgaactccggctcgcaggccaaccagggcgtgttcttcgccgtgctcaagccgggcgatacgatcatgggcatgagcctcgcgcacggaggccacctgactcacggttcgccggtcaacatgtcgggcaagtggttcaacgtggtgagctacggcctgaacgaagccgaagacatcgactacgaagccgcggagaagctcgctcaggaacacaagccgaagctgatcgtggcgggcgcctccgcgttctcgctgcgtatcgatttcgaacgcatgtcgaagatcgccaggtcggtcggcgcgtatttcatggtcgacatggcgcattacgccggtctgatcgccgcgggcgtctatccgaatccggtgccgcacgccgatttcgtcaccaccaccacgcacaagagcctgcgcggcccgcgcggcggcgtgatcctgatgaaggcggagttcgaaaagcagatcaactcggccatcttcccgggcattcaaggtggaccgttgatgcacgtgatcgccggcaaggccgtcgcgttcaaggaagcgctctcgccggagttcaaggcgtatcagcagcaggtcgtcgaaaacgcgcgtgtgctggcggaaacgctggtcaagcgcggtctgcgcatcgtgtcgggccgcactgaaagccatgtgatgctcgtcgacctgcgtgcaaagaagattaccggcaaggctgcggaagcagcgctgggcacggctcacatcacggtcaacaagaacgcgattccgaacgatccggaaaagccgttcgtgacgagcggcgtgcgtctcggctcgccggccatgaccacgcgcggcttcggcgtcaaggaagccgagcaggtgggtaacctgatcgccgacgtgctggacaacccggaagacgccgccacgatcgaacgtgtgcgcgcgcaggtcgccgagctgacccagcgcttcccggtttaccgttaa

SEQ ID NO: 10446 - protein, 415 aa, Burkholderia xenovorans LB400
MFDRAQSTIANVDPELWKVIEQENRRQEEHIELIASENYTSPAVMAAQGSQLTNKYAEGYPGKRYYGGCEYVDIAEQLAIDRVKQLFGAEAANVQPNSGSQANQGVFFAVLKPGDTIMGMSLAHGGHLTHGSPVNMSGKWFNVVSYGLNEAEDIDYEAAEKLAQEHKPKLIVAGASAFSLRIDFERMSKIARSVGAYFMVDMAHYAGLIAAGVYPNPVPHADFVTTTTHKSLRGPRGGVILMKAEFEKQINSAIFPGIQGGPLMHVIAGKAVAFKEALSPEFKAYQQQVVENARVLAETLVKRGLRIVSGRTESHVMLVDLRAKKITGKAAEAALGTAHITVNKNAIPNDPEKPFVTSGVRLGSPAMTTRGFGVKEAEQVGNLIADVLDNPEDAATIERVRAQVAELTQRFPVYR

SEQ ID NO: 10447 - DNA, 1254 bp, Shewanella denitrificans OS217
  CDS (1)..(1254): transl_table=11
atgctaaacaaagctatgaatatcgcggattatgatccacaactatttaaagccattgaagacgaaacccgtcgtcaagaagagcacatagagttaattgcatcagaaaactacaccagtcctcgcgtcatggaagcacaaggttcacagcttaccaataagtatgcagaaggttacccaggcaagcgttattacggcggttgtgaatacgtcgatgtggttgaaaccttggccatcgaacgtgctaaagaattgtttggcgcgacttatgccaacgttcagcctcattcaggatcgcaagccaacagcgctgtgtacatggcgctacttaagcccggtgatactgtgcttgggatgaatttggctcatggtggtcacttaacgcacggttcaccagtgaacttttctggcaagctgtataacatcattccttacggcatcgatgaagcgggcaagatagattacgttgagatggagcgtttagccgttgagcataagcctaagatgatgatcggtggcttctctgccttttctggtatcgttgattgggcaaaaatgcgtgaaatcgcagacaaaattggcgcttacttatttgttgatatggcccacgttgcaggtttaattgccgcaggcgtgtatccaaaccctgtgccccatgcccacgtggtgacatccaccacacataagaccttagcaggccctcgtggcgggttaatcttatcggcagcagacgatgaagacttgtacaagaagctaaattcggccgtgttccctggcggacagggcggcccattgatgcatgttatcgcgggtaaagcggtggcctttaaggaagccttagagcctgagtttaaaacctatcagcagcaagtggtgaaaaacgctaaggctatggttgaagtgtttatcgagcgcggttataaaatcgtctcaggcggcacagataaccacctgatgctggttgacttaattggccgtgatcttaccggtaaagaagcggatgccgccttaggtagcgctaacattaccgtgaataaaaactcggtgccaaacgatccacgttcaccttttgtgacatctggtgtgcgtatcggtactccggctattacccgtcgtggttttaaagaagccgaagccaaagccttgacaacttgggtgtgtgacattctcgatgacgctaataatccagcggttattgagcgggtcaagggtgaagtgttagccctgtgtgccaagtatccagtatacgcttaa

SEQ ID NO: 10448 - protein, 417 aa, Shewanella denitrificans OS217
MLNKAMNIADYDPQLFKAIEDETRRQEEHIELIASENYTSPRVMEAQGSQLTNKYAEGYPGKRYYGGCEYVDVVETLAIERAKELFGATYANVQPHSGSQANSAVYMALLKPGDTVLGMNLAHGGHLTHGSPVNFSGKLYNIIPYGIDEAGKIDYVEMERLAVEHKPKMMIGGFSAFSGIVDWAKMREIADKIGAYLFVDMAHVAGLIAAGVYPNPVPHAHVVTSTTHKTLAGPRGGLILSAADDEDLYKKLNSAVFPGGQGGPLMHVIAGKAVAFKEALEPEFKTYQQQVVKNAKAMVEVFIERGYKIVSGGTDNHLMLVDLIGRDLTGKEADAALGSANITVNKNSVPNDPRSPFVTSGVRIGTPAITRRGFKEAEAKALTTWVCDILDDANNPAVIERVKGEVLALCAKYPVYA

SEQ ID NO: 10449 - DNA, 1245 bp, Methanococcoides burtonii DSM 6242
  CDS (1)..(1245): transl_table=11
atgtcttacatttcagagattgacccggaaattgccaatgcattgtcattggaggcacagcgtcaggatttcaagttgaacttgatcgcttcagagaactacaccagccgcgctgttatggaagcacagggttccataatgaccaacaagtacgcagaaggctattccggaaagcgttattatggtggttgcgaatttgtcgatatggcagaggaccttgctatctcaagagcaaagcagatcttcggtgcagagcatgttaatgtccagcctcattcaggctcaggagctaacatggctgtctatttttctgttatcaagccaggcgacaagatcatgtcaatggacctttcccacggtggtcatctttcccacggaagtcctgtgagcttttcaggtcagttgtacaacatcgttccatacggtgtttcccaggataccgagatgcttgattataacgagctcatggaaatagcaaagaaagagaagccacagatgatcgttgtcggagcatctgcatattcccgtattatcgatttcaaggcattcagggaaattgctgacgaggttggagcataccttctcgcagatgttgcacacattgccggacttattgctgccggtgtacacccaaatccattcccatatgctgactttgtgacaacaaccactcataagacacttcgtggtccaaggggtggaatggtaatgtgcaaggaagagtacgcaaaagctatcaacaagtctgtattccccggaattcagggcggtcctcttatgcacataatcgctgcaaaggcagttgcattcaaggaagcattgagtgacagtttcaaaaaggatcaggaacaaaccgtcaagaacgcaaaagcactttgtgcagcgcttcaggacagggaattcgatatagtctctgatggaactgacaaccatcttatgcttatcaaccttaacaaatacgaccttacaggaaaggatgctgaggtcattatgagcaaagctggtattgttatcaacaagaataccattccattcgagacaagaggacctttcattacaagtggtctcagggcaggtacacctgcttgtactacacgtggtatgaaggaatcagcaatggatgagattgcagactttttcaagaccattattgacaacagggagaacaatgcagtccttgagactgtcaatgcagatgttcaggaactttgcagtcgcttccctatctatgagcatcttagataa

SEQ ID NO: 10450 - protein, 414 aa, Methanococcoides burtonii DSM 6242
MSYISEIDPEIANALSLEAQRQDFKLNLIASENYTSRAVMEAQGSIMTNKYAEGYSGKRYYGGCEFVDMAEDLAISRAKQIFGAEHVNVQPHSGSGANMAVYFSVIKPGDKIMSMDLSHGGHLSHGSPVSFSGQLYNIVPYGVSQDTEMLDYNELMEIAKKEKPQMIVVGASAYSRIIDFKAFREIADEVGAYLLADVAHIAGLIAAGVHPNPFPYADFVTTTTHKTLRGPRGGMVMCKEEYAKAINKSVFPGIQGGPLMHIIAAKAVAFKEALSDSFKKDQEQTVKNAKALCAALQDREFDIVSDGTDNHLMLINLNKYDLTGKDAEVIMSKAGIVINKNTIPFETRGPFITSGLRAGTPACTTRGMKESAMDEIADFFKTIIDNRENNAVLETVNADVQELCSRFPIYEHLR

SEQ ID NO: 10451 - DNA, 1257 bp, Psychrobacter cryohalolentis K5
  CDS (1)..(1257): transl_table=11
atgtttaaagatatctctatcaaagattttgatccagtacttgctgaagctatggctgctgaaagcgttcgtcaagagaaccatattgagcttatcgcttcagaaaactactgctcacaagcagtgatggaagcgcagggtactgatttgaccaacaaatacgctgaaggctatcctggtaagcgctattacggtggttgtgagcatgttgacgtcgttgagcaactagctattgaccgtgcaaaagaattgtttggtgcagaatatgtgaacgtacagccacactctggtagccaagcaaactctgctgtctttttagcattgcttgaagccaatgatactgtgcttggcatgagtttagatgctggtggtcacttaacgcatggcgcacatatcaacttctcaggtctaaactacaatgcagtacagtatggtttggtcgaaggcactggtcttatcgattatgaccaagttgagagcttggcaaaagagcataagcctaaaatgatcatcgctggtttttcagcgtattcacaagtagttgattgggcgcgtttccgtgaaatcgctgacgaagtaggcgcttacttactagtcgatatggctcacgttgctggtcttatcgctggcggcgtttacccaagcccagtaccatttgctgatgtagtgaccacgactacgcacaaaaccttacgtggcccacgttcaggtatgattcttgctcgtgatgaagtacttgctaaaaagctcaattctgccgtattcccaggtaaccaaggtggcccgttgatgcatgtcatcgcggcaaaagcagtttgctttaaagaagcattagaagagaacttcaaaacctatcagcagcaagtggttaaaaacgctcaagccatggcgaaagtcattcaagatcgcggctacgaaattatctctggtggcactgaaaaccatctgatgcttatcagcttagttaagcaagagatgaccggtaaagaagcggataaatggttgggtgacgcacacattacggtcaataaaaacgccgtaccaaacgatccaaaatctccgtttgtgacttctggtatccgtattggtacaccagcgattaccactcgcggcttcaacgaagcacaagcaggtgatttggcaggttggatttgtgatgttcttgacagccgtggcgatgaagcagtgactgctgaagtacgtggcaaagtagaagcgatctgtaaagagcttcctgtctatgctaaaaaccagtaa

SEQ ID NO: 10452 - protein, 418 aa, Psychrobacter cryohalolentis K5
MFKDISIKDFDPVLAEAMAAESVRQENHIELIASENYCSQAVMEAQGTDLTNKYAEGYPGKRYYGGCEHVDVVEQLAIDRAKELFGAEYVNVQPHSGSQANSAVFLALLEANDTVLGMSLDAGGHLTHGAHINFSGLNYNAVQYGLVEGTGLIDYDQVESLAKEHKPKMIIAGFSAYSQVVDWARFREIADEVGAYLLVDMAHVAGLIAGGVYPSPVPFADVVTTTTHKTLRGPRSGMILARDEVLAKKLNSAVFPGNQGGPLMHVIAAKAVCFKEALEENFKTYQQQVVKNAQAMAKVIQDRGYEIISGGTENHLMLISLVKQEMTGKEADKWLGDAHITVNKNAVPNDPKSPFVTSGIRIGTPAITTRGFNEAQAGDLAGWICDVLDSRGDEAVTAEVRGKVEAICKELPVYAKNQ

SEQ ID NO: 10453 - DNA, 1254 bp, Baumannia cicadellinicola str. Hc (Homalodisca coagulata)
  CDS (1)..(1254): transl_table=11
atgtttaaatatgatattaatattgctaattatgatactgctttatggaaagctatagaactagaagctaaacgtcaagaagaacacatcgaattaattgcatctgaaaactatacaagtccacgtgttatgcaagcacaaggttctattttaactaataaatatgctgaaggttattcaggtaaacgttactacggtggatgtgtatatgttgatcaagttgaaacattagctatagaccgcgctaaagcattatttgagtgtgattatgctaacgtacaaccacattctggctcacaagcaaattttgctgtgtacacagcgttattaaagccaggagatactatcttaggtatgaacttagctcatggtggtcatttaactcatggtgcttcggttaatttttctggaaaaatgtataatgtgatttcttatggcgttaataagaatggctatatcgactacgagcagttaaataaactagctacaatgcataaaccaaaaatgattattggtggtttttctgcttattctcgtgtggttgattgggatatcatgcgccaagtagctgatagtattaaagcatttttatttgtagacatggctcatattgccggtttagtagcggctggtgtttatcctaatcccgtaccttatgcagatgtcgtaactacaactacccataaaactctagctggtcctcgtggaggattaatacttgctcaaggtggtagtaaagaaatgtataaaaagcttgattctgccgtttttcctggagcgcaaggtggtccattaatgcatgtaatagcgggaaaagcaatagcattaaaggaagccatggagccagagttcaagatatatcaacaccaggtagtaaaaaatgctaaaactatggttaatgtattcttaaataggaattttaacgtagtatctggtggtacagataaccatctttttttactggatttagtagataaaaatataacaggccaagaagctgatgctgctttaagttatacaaatattacagttaacaaaaatattattccaaatgatccgcaaagttcatttgttacttctggtattcgcatcggcactccagctattactcgccgtggttttaatgaaactgatgcatatcagttagcgaactggatttgtgacgtactagaaaacattaataatgaagtagtacttaatgctacgaagaaaaaagtactaaatatttgtgctagtcatccagtttattcttga

SEQ ID NO: 10454 - protein, 417 aa, Baumannia cicadellinicola str. Hc (Homalodisca coagulata)
MFKYDINIANYDTALWKAIELEAKRQEEHIELIASENYTSPRVMQAQGSILTNKYAEGYSGKRYYGGCVYVDQVETLAIDRAKALFECDYANVQPHSGSQANFAVYTALLKPGDTILGMNLAHGGHLTHGASVNFSGKMYNVISYGVNKNGYIDYEQLNKLATMHKPKMIIGGFSAYSRVVDWDIMRQVADSIKAFLFVDMAHIAGLVAAGVYPNPVPYADVVTTTTHKTLAGPRGGLILAQGGSKEMYKKLDSAVFPGAQGGPLMHVIAGKAIALKEAMEPEFKIYQHQVVKNAKTMVNVFLNRNFNVVSGGTDNHLFLLDLVDKNITGQEADAALSYTNITVNKNIIPNDPQSSFVTSGIRIGTPAITRRGFNETDAYQLANWICDVLENINNEVVLNATKKKVLNICASHPVYS

SEQ ID NO: 10455 - DNA, 1239 bp, Lawsonia intracellularis PHE/MN1-00
  CDS (1)..(1239): transl_table=11
atggatcaaataatacttcaagaccctgaattagcccaagcaattatcttagaaagtggccgacaaatagataagcttgaacttattgcatctgaaaatattgcttcaactgcagttcgagaagcacaatcaacaattttaacaaataaatatgctgagggttatcctgggaagcgttattatggtggttgtgaatatgtcgacatagctgaaaatttagcgatagaacgtgctaaagcactttttcatagtgaatatgctaatgtccaaccccactctggaagtcaagctaatatgggagcttattttgctctcattaagcctagggatacaatcttaggtatgaatttatctcatggaggacatttaactcatggaagtcctgtaaacttttcaggtcgactttttaatattgtatcgtatggtgtcaacaaagagacaggacttattgactatgaagaagtagcaaagcttgcagaaaaacataaaccacaactgattgtagctggagctagtgcttatccacgtattattgacttttctaaatttcgttcaattgctgatacaataggagcaaaacttcttgtagatatggcacatattgctgggcttgtagctacaaacttacacccttctccaataccatacgcacatataacaacaactactacacataaaacactacgtggtcctcgtggtggtatgattctttctacagaagatatggggaaggtaatcaatagccaaattttccctgggatacaaggtgggccacttatgcacgttattgcagcaaaagcagtagcattaggagaagcttcaaaagctagctttgtaacttaccaaaaacaagtaatcttaaatgctaaaacccttgcaaaacaacttttggatgctggttttaaccttgtttctggaggaacagataatcatcttctattaattgacttaacaaataaaaaaattacaggtaaagatgcagaaaaagctcttgatcaagctggcattactgtaaataaaaatacagttccttttgaaacactttctccttttgtaacatctggtattcgtattggcacaccagctttaacaactcgaggtttatgtgaacaagatatgataaaggttgctaactggattgttactgctcttaataatatcaataacgaaactcaacttaaagaaataaataaagaagttacttattttgctcgtcaatttccactcttttcatggtaa

SEQ ID NO: 10456 - protein, 412 aa, Lawsonia intracellularis PHE/MN1-00
MDQIILQDPELAQAIILESGRQIDKLELIASENIASTAVREAQSTILTNKYAEGYPGKRYYGGCEYVDIAENLAIERAKALFHSEYANVQPHSGSQANMGAYFALIKPRDTILGMNLSHGGHLTHGSPVNFSGRLFNIVSYGVNKETGLIDYEEVAKLAEKHKPQLIVAGASAYPRIIDFSKFRSIADTIGAKLLVDMAHIAGLVATNLHPSPIPYAHITTTTTHKTLRGPRGGMILSTEDMGKVINSQIFPGIQGGPLMHVIAAKAVALGEASKASFVTYQKQVILNAKTLAKQLLDAGFNLVSGGTDNHLLLIDLTNKKITGKDAEKALDQAGITVNKNTVPFETLSPFVTSGIRIGTPALTTRGLCEQDMIKVANWIVTALNNINNETQLKEINKEVTYFARQFPLFSW

SEQ ID NO: 10457 - DNA, 1254 bp, Pseudomonas entomophila L48
  CDS (1)..(1254): transl_table=11
atgttcagccgtgatttgaccattgccaagtacgacgccgagctcttcgaagccatgcagcaagaagccctgcgccaggaagagcatatcgagctgatcgcttcggaaaactacaccagcccggcggtcatggaggcccagggttcggttctgaccaacaagtacgccgaaggctacccaggcaagcgctactacggtggttgcgagtacgtcgacgtggtcgagcaactggccatcgaccgcgccaaagaactgttcggcgccgactacgccaacgtccagccgcacgccggctcccaagccaacgccgctgtctacctggcgctgctgtcggccggcgacaccatcctgggcatgagcctggcccacggcggtcacctgacccacggcgccagcgtttcctcctcgggcaagctgtacaacgccatccagtacggcatcgacgccaacggcctgatcgactacgacgaagttgaagcgctggccctggagcacaagccgaagatgatcgtcgccggcttctccgcctactcgcaggttctggacttcccacgcttccgcgaaatcgccgacaaggtcggtgcctacctgttcgtcgacatggcccacgtggccggcctggttgccgctggcgtgtacccgaacccggttccgttcgccgacgtggtcaccaccaccacccacaagaccctgcgcggtccacgtggtggcctgatcctggcccgtgccaacgccgacatcgagaagaagctgaactccgccgtcttcccgggcgcccagggcggcccgctggagcacgtcatcgccgccaaggcgatctgcttcaaggaagccctgcagcctgagttcaaggcttaccagcagcaagtcgtgaagaacgcccaggccatggccgaagtgttcatcgagcgtggtttcgacgtcgtttccggcggtacccagaaccacctgttcctgctgtcgctgatcaagcaggaaatctccggtaaggacgccgacgccgccctgggcaaggctttcatcaccgtcaacaagaactcggtcccgaacgacccacgttcgccgttcgtcacctcgggcctgcgtttcggcaccccagccgtcaccacccgtggtttcaaagagacagaatgccgcgagctggccggctggatctgcgacatcctggccgacctgaacaacgaagcggtgatcgacgccgtgcgtgagaaggtcaaggccatctgcaagaagctgccggtgtacggcaactga

SEQ ID NO: 10458 - protein, 417 aa, Pseudomonas entomophila L48
MFSRDLTIAKYDAELFEAMQQEALRQEEHIELIASENYTSPAVMEAQGSVLTNKYAEGYPGKRYYGGCEYVDVVEQLAIDRAKELFGADYANVQPHAGSQANAAVYLALLSAGDTILGMSLAHGGHLTHGASVSSSGKLYNAIQYGIDANGLIDYDEVEALALEHKPKMIVAGFSAYSQVLDFPRFREIADKVGAYLFVDMAHVAGLVAAGVYPNPVPFADVVTTTTHKTLRGPRGGLILARANADIEKKLNSAVFPGAQGGPLEHVIAAKAICFKEALQPEFKAYQQQVVKNAQAMAEVFIERGFDVVSGGTQNHLFLLSLIKQEISGKDADAALGKAFITVNKNSVPNDPRSPFVTSGLRFGTPAVTTRGFKETECRELAGWICDILADLNNEAVIDAVREKVKAICKKLPVYGN

SEQ ID NO: 10459 - DNA, 1254 bp, Pseudomonas entomophila L48
  CDS (1)..(1254): transl_table=11
atgttcagcaagcaagaccagatccagggttatgacgacgcactgctggcggcgatgaatgccgaggaacagcgccaggaagatcacatcgagctgatcgcctcggagaactacaccagcaagcgcgtgatgcaggcccagggcagcggcctgaccaacaagtacgccgagggctatccgggcaagcgctactacggtggttgcgagcacgtcgacaaggtggaagccctggccatcgagcgcgccaagcagctgttcggcgccgactacgccaacgttcagccacactccggctcttcggccaacagcgccgtctatctggccctgctgcaggccggcgacaccatcctgggcatgagcctggcccacggcggccacctgacccacggcgcgaaagtgtcgtcctcgggcaagctgtacaacgccgtgcagtacggcatcgacaccaccaccggcctgatcgactacgacgaagtcgagcgcctggccgtcgagcacaagccgaagatgatcgtcgccggtttctcggcctactcgaagaccctcgatttcccacgcttccgccagatcgccgataaagtcggcgcgctgctgttcgtcgacatggcccacgtcgccggcctggtcgccgccggcctgtacccgaacccgatccccttcgccgacgtggtcaccaccaccacccacaagaccctgcgcggcccgcgtggcggcctgatcctggccaagtccaacgaagagatcgagaaaaagctcaatgctgcggtgttccccggcgcccagggcggcccgctgatgcacgtgatcgccgccaaggcggtgtgcttcaaggaagcgctggaacccggcttcaaggcctaccagaagcaggtcatcgagaacgcccaggccatggcccaggtgttcatcgagcgcggctacgacgtggtctccggcggcaccgacaaccacctgttcctggtcagcctgatccgccagggcctgaccggcaaggacgctgacgccgccctcggccgcgcccatatcaccgtcaacaagaacgccgtgcccaacgacccgcagtcgccgttcgtcacctcgggcctgcgcatcggcaccccggccgtcaccacccgtggtttcaaggtcgcccagtgcgtggcgctggccggctggatctgcgatgtgctggacaacctgggcgacgccgatgtcgaggccgatgtggccaagaacgtcgccgccctgtgcgccgacttcccggtctaccgctga

SEQ ID NO: 10460 - protein, 417 aa, Pseudomonas entomophila L48
MFSKQDQIQGYDDALLAAMNAEEQRQEDHIELIASENYTSKRVMQAQGSGLTNKYAEGYPGKRYYGGCEHVDKVEALAIERAKQLFGADYANVQPHSGSSANSAVYLALLQAGDTILGMSLAHGGHLTHGAKVSSSGKLYNAVQYGIDTTTGLIDYDEVERLAVEHKPKMIVAGFSAYSKTLDFPRFRQIADKVGALLFVDMAHVAGLVAAGLYPNPIPFADVVTTTTHKTLRGPRGGLILAKSNEEIEKKLNAAVFPGAQGGPLMHVIAAKAVCFKEALEPGFKAYQKQVIENAQAMAQVFIERGYDVVSGGTDNHLFLVSLIRQGLTGKDADAALGRAHITVNKNAVPNDPQSPFVTSGLRIGTPAVTTRGFKVAQCVALAGWICDVLDNLGDADVEADVAKNVAALCADFPVYR

SEQ ID NO: 10461 - DNA, 1257 bp, Myxococcus xanthus DK 1622
  CDS (1)..(1257): transl_table=11
atggagaacatccgtacgctggccgaagtggacccggagattgcccgcgtcctccgcgaggagacccagcgccaggaggaagggctggagctcatcgcttcggagaacttcgtctctccggcggtgatggaggcggtgggctcggtgctcaccaacaagtacgcggaaggctaccccggcaagcgctactacggcggctgcgaggtggtggacgtcgcggagaacctggccatcgcccgcgccaaggacctgttcggcgcggacgcggtcaacgtgcaggcgcactccggcagccaggccaacatgggcgccttcatggcgctgatgaagccgggcgacaccatgctgtcgctggacctcaactccggcggccacctcacccacggcgccacgttcaacttctccggcaagctctacaaggtcgtccactacggcctgacgcgtgacacggagaccatcgacttcgcgcaggtggagtcgctggccaaggagcacaagccgaaggtcatcgtcgtgggcgccagtgcgtacccgcgcacgctggacttcgcgaagttccgcgagatcgccgacgcggtgggcgcggcgatgctggtggacatggcgcacatcgccggcctggtggcggcgggcgtgcacccttcgccggtgccggtggcggacatcgtcaccagcaccacgcacaagacgctgcgcggtccgcgtggcggcctggtgctgagccgcgagccctacgccaaggccatcaacagtcagatcttccccggcatccagggcggcccgctgatgcacgtcatcgccggcaaggcggtggccttcaaggaggcgctgtcgccggagttcaaggcgtaccagcggcagattgtcgccaacgcgaaggcgctggcggaggcgctccagcgcgcgggcctgcggctgacgtccggcggcacggacaaccacctgatgctggtggacctgcgccccaagaagctcacgggcaaggtggccgaagaggtgctggacaaggccggaatcaccgtgaacaagaacatgattccgtttgacccggagaagccgatgaccacgtccggtgtccgggtgggcacgccggccatcaccacgcgcggcatgcgcgaggcggagatggcggtggtggggcggctcatcggcgaggcgctggacgccgcgcaggacgacgccgcgctggcccgcatcaaggggcaggtgaaggagctttcgcaggggttcccgctctacgcctcgcggttgaagtag

SEQ ID NO: 10462 - protein, 418 aa, Myxococcus xanthus DK 1622
MENIRTLAEVDPEIARVLREETQRQEEGLELIASENFVSPAVMEAVGSVLTNKYAEGYPGKRYYGGCEVVDVAENLAIARAKDLFGADAVNVQAHSGSQANMGAFMALMKPGDTMLSLDLNSGGHLTHGATFNFSGKLYKVVHYGLTRDTETIDFAQVESLAKEHKPKVIVVGASAYPRTLDFAKFREIADAVGAAMLVDMAHIAGLVAAGVHPSPVPVADIVTSTTHKTLRGPRGGLVLSREPYAKAINSQIFPGIQGGPLMHVIAGKAVAFKEALSPEFKAYQRQIVANAKALAEALQRAGLRLTSGGTDNHLMLVDLRPKKLTGKVAEEVLDKAGITVNKNMIPFDPEKPMTTSGVRVGTPAITTRGMREAEMAVVGRLIGEALDAAQDDAALARIKGQVKELSQGFPLYASRLK

SEQ ID NO: 10463 - DNA, 1305 bp, Rubrobacter xylanophilus DSM 9941
  CDS (1)..(1305): transl_table=11
atgggggcgcgggcgtcgagttttcggggaggggcggatgcccggcggatcccgcggagcggaggtggagcggagaggatgatgataggaccctacaccgaggtagtagacgccgaggtccaggaggcgctcgacggggagctggagcgccagcggaccaccatagagctcatcgccagcgagaacttcgcctcccccgcggtgctggcggcccagggctcggtgatgaccaacaagtacgccgaggggtatccggggaggcgctactacggcggctgcgagttcatggaccgggtcgagctgcttgcgataaaccgggcgaaggagctcttcggggccgagcacgtcaacgtccagccgcactcgggcagccaggccaacgaggccgcctacgcgaccctcatagagcccggcgacaaggtgctgagcatggaccttgcgcacggcgggcacctcacccacgggatgaagatcaacttcagcggccgcacctacgagttcgtccactacggggtgggggaggacgggttcatagactacgaccgggtgcgcgagatcgcgctgcgcgagcggccccgcctcatcctcgcgggggccagcgcctacccccgcgtcctgcacttcgaccggttccgcgagatcgccgacgaggtgggcgcctacttcatggcggacatggcccacgttgcggggctggtggcgggcggggtgcacccctcgccggtgccccactgcgaggtcgtcaccaccaccacccacaagacgctgcgcggggcccggggcgggatggtcctctgccgcgaggagttcgcctcccggctcggcagccgcgtcttcccgggcttgcagggggggccgctgatgcacgccatcgcgggcaaggcggtggccctcggcgaggcgctgcggccggagttcaaggactacgcccgcaggatcgtggagaacgcgcgggcgctggccgaagggctcatggagggcgggctgaagctcgtctccggcggcaccgacaaccacatgatgctcgtggacctgcggggcagcggcatcaccggcaaggaactggagcagcggctggagtccgtcggggtgacctgcaacaagaacatggtccccggagaccccgagccccccaccgtcaccagcggggtgcggctcggcacccccgccatgaccacccgggggatggggccgggggagatgcgcgagatcgcggacatcatcgtccgggcggcccgcggtgagaccgatggcctgcgcaggcgggtccttgccctcaccgaggccttcccgctgtatgcctga

SEQ ID NO: 10464 - protein, 434 aa, Rubrobacter xylanophilus DSM 9941
MGARASSFRGGADARRIPRSGGGAERMMIGPYTEVVDAEVQEALDGELERQRTTIELIASENFASPAVLAAQGSVMTNKYAEGYPGRRYYGGCEFMDRVELLAINRAKELFGAEHVNVQPHSGSQANEAAYATLIEPGDKVLSMDLAHGGHLTHGMKINFSGRTYEFVHYGVGEDGFIDYDRVREIALRERPRLILAGASAYPRVLHFDRFREIADEVGAYFMADMAHVAGLVAGGVHPSPVPHCEVVTTTTHKTLRGARGGMVLCREEFASRLGSRVFPGLQGGPLMHAIAGKAVALGEALRPEFKDYARRIVENARALAEGLMEGGLKLVSGGTDNHMMLVDLRGSGITGKELEQRLESVGVTCNKNMVPGDPEPPTVTSGVRLGTPAMTTRGMGPGEMREIADIIVRAARGETDGLRRRVLALTEAFPLYA

SEQ ID NO: 10465 - DNA, 1257 bp, Pseudoalteromonas atlantica T6c
  CDS (1)..(1257): transl_table=11
atgttatcacgtgacatgaatattgccgattttgatcctgagttgagtcaagctatcgcgcaagaaacccagcgccaagaagatcacattgaactgatcgcctctgaaaactactgtagcccgcgcgtacttgaagcccaaggctcgcaactaaccaataaatacgctgaaggttacccgcacaagcgttactacggcggttgtgaatacgttgatatcgcagaagatttagccattgagcgtgctaaccaattattcggctctgactacgctaacgtgcagcctcactctggctcacaagctaactcagcggtatttatggcgttacttgacgctggtgataccgtgctagggatgagcttggcacacggtggtcacttaacccacggcgcacatgttagcttctcgggcaaaacgtataacgcagtgcagtacggtatcgatgagcaaactggcaaaatcgattacgacgtagttgaagcgctcgcggttgagcataagccaaaaatgatcatcggtggtttctcagcgtactcaggtattgttgattggcagcgtttccgtgaaatcgcggacaaagtaggtgcttacttattagtggatatggctcacgttgcaggtttagtggccgctggtttataccctaacccattacctcatgcgcatgtggtgaccaccactacgcataaaaccttagctgggccacgtggcggtttgattttatcagcttgtggcgatgaagcgatttacaaaaaactaaacagctcagtattccctggtaatcaaggtggtcctttgtgtcacgtgattgcagcgaaagccgttgcgtttaaagaagcattacagccagattttaaagcataccaacagcaagtattgcttaacgcgaaagccatggtcagcgtgatgcaagagcgcgggtacgacatcgtatctggcggcaccgataaccacctgttcttgcttgatttgatcagcaaagatatcacaggtaaagatgctgacgcagcgctagggcgcgctaacatcacagtgaacaaaaactcagtccctaacgacccacgctctccgtttgtgaccagtggtttgcgtattggctcacctgccattacccgccgtggttttaaagaagaacaagcgaagcaagtggctacgtggatttgtgacgttatcgacaacatcgaagacgaagcggtgatcgaacgcgtaaaaggtgaagtactaaccctttgcggtaagttcccggtatacgcgtag

SEQ ID NO: 10466 - protein, 418 aa, Pseudoalteromonas atlantica T6c
MLSRDMNIADFDPELSQAIAQETQRQEDHIELIASENYCSPRVLEAQGSQLTNKYAEGYPHKRYYGGCEYVDIAEDLAIERANQLFGSDYANVQPHSGSQANSAVFMALLDAGDTVLGMSLAHGGHLTHGAHVSFSGKTYNAVQYGIDEQTGKIDYDVVEALAVEHKPKMIIGGFSAYSGIVDWQRFREIADKVGAYLLVDMAHVAGLVAAGLYPNPLPHAHVVTTTTHKTLAGPRGGLILSACGDEAIYKKLNSSVFPGNQGGPLCHVIAAKAVAFKEALQPDFKAYQQQVLLNAKAMVSVMQERGYDIVSGGTDNHLFLLDLISKDITGKDADAALGRANITVNKNSVPNDPRSPFVTSGLRIGSPAITRRGFKEEQAKQVATWICDVIDNIEDEAVIERVKGEVLTLCGKFPVYA

SEQ ID NO: 10467 - DNA, 1314 bp, Mesorhizobium sp. BNC1
  CDS (1)..(1314): transl_table=11
atggcacaagcatcgaccgtcgcggccgagaccgagacctttttctcccggccgctcgaggaaaccgattccgagatattctcggcaattcgcagcgaactcggccgccagcggcatgagattgagctgatcgcctccgaaaatatcgtctcgcgcgcagtgctcgaggcgcagggtacggtgctcaccaacaaatatgccgagggttatccgggtaagcgttattacggcggctgccagttcgtcgacgtggtggagcagcttgcgatcgaccgcgccaagaagcttttcaattgccagtttgcaaatgtgcagccccattcgggcagccagatgaaccaggcggtgttcctggcgctgctccagccgggcgacaccttcatggggctcgacctgaattcgggcggccaccttacccacggctcccccgtcaacatgtcgggaaagtggttcaacgtcgtttcctatggcgtgcgccgcgacgataacctcctcgatatggacgaggtggagcggctcgccacggagcacaagccgaagctgatcctggccggcggcacggcctattcgcggatttgggactggaagcgcttccgcgaaatcgccgatagcgtcggcgcctatctgatggtcgatatggcgcatatcgcgggcctcgtggcaggcggcgcgcatccttctccgctgccgcatgcgcatgtggtcaccacgacgacgcacaaatcgctgcgcggcccgcgcggcggcatggtcctcaccaatgacgaggatatcgccaaaaaggtgaactccgccgtgttcccgggcctgcagggcgggccgctgatgcatgtgattgccgccaaggcggtggcgctcggcgaggcgttgcagcccgaattcaaagcctatgcgcaccaggtggtggcgaatgcccgcgcgcttgcggcaagccttcaggagacagggctggagatcgtctccggcggcacggacaatcacctgatgctggtggatctcaggcccaaaaacgccacgggcaagcgggcggaggccgcccttggccgcgccaacatcacctgcaacaagaacggcattccctttgatcccgagaagcccttcgtgacctctggcatccggcttggcacgcccgctggcaccacgcgcggcttcggcgtagccgaattcagccagatcggccagcttatcgctgaggtcctggatgggctgcgcgccgtcaactccgacgatggcaatatcgccgtcgaggaggcggtgaagaaaaaggtgattgcccttaccgaacgtttcccgctctattcatatctggactga

SEQ ID NO: 10468 - protein, 437 aa, Mesorhizobium sp. BNC1
MAQASTVAAETETFFSRPLEETDSEIFSAIRSELGRQRHEIELIASENIVSRAVLEAQGTVLTNKYAEGYPGKRYYGGCQFVDVVEQLAIDRAKKLFNCQFANVQPHSGSQMNQAVFLALLQPGDTFMGLDLNSGGHLTHGSPVNMSGKWFNVVSYGVRRDDNLLDMDEVERLATEHKPKLILAGGTAYSRIWDWKRFREIADSVGAYLMVDMAHIAGLVAGGAHPSPLPHAHVVTTTTHKSLRGPRGGMVLTNDEDIAKKVNSAVFPGLQGGPLMHVIAAKAVALGEALQPEFKAYAHQVVANARALAASLQETGLEIVSGGTDNHLMLVDLRPKNATGKRAEAALGRANITCNKNGIPFDPEKPFVTSGIRLGTPAGTTRGFGVAEFSQIGQLIAEVLDGLRAVNSDDGNIAVEEAVKKKVIALTERFPLYSYLD

SEQ ID NO: 10469 - DNA, 1233 bp, Clostridium perfringens ATCC 13124
  CDS (1)..(1233): transl_table=11
atgaattttgacaacttagaaagagaagatgagcaaattgcacatcttgttcaaaaggaaaaggaaagacaagaaaatagtatagagcttatagcttcagaaaactttgttagcaaagctgttatggaagctatgggatcatatttaacaaataaatatgctgagggttacccttcaaaaagatactatggtggatgtcacgtagtagatgaggttgaagatttagcaagagaaagagtaaaaaaattatttggggctgagcatgctaatgtacaaccacattcaggatcacaagctaatatggctgtttatttttcaatattagagccaggtgatactgtattaggaatggatttaagccatggaggacatttaactcatggttcaccagttaacttttcaggtagattatttaatttcgtgtcatatggtgtagataaagagacagaaacaataaattatgaaactgtaagagaattagctcttaaacataaacctaaattaatagttgcaggagctagtgcatattcaagaattatagattttaaaactttaagagagatagcagatgaggtaggagcatacttaatggttgatatagctcacattgcagggcttgtagctacaggcttacatccatcaccagttccttatgctgattttgttacatcaacaactcataaaactttaagaggaccaagaggtggattaatactttgtaaagaaaaatttgcaaaagcattagataagaatatcttcccaggaatacaaggtggtcctttaatgcatataatagctgcaaaggctgtttgttttaaagaagcattagaaccaagttttaaaacatatatggagcaagttgttaaaaatgcacatgttttagcagaagctttagaatcttatggatttaaattagtttcaaatggaactgataaccatttaatacttgttgatttaactaataaagatataactggtaaagatgcagaaattcttttagatagcataggaataactttaaacaaaaatactgtaccaaatgaaacaagaagtccatttgttactagtggtgttagaataggaactcctgctataacaactagaggatttaaagaagaagaaatgaaagaaatagcttctataataaatgatgctattaaagaaaaagatggagatttagagccattaaaagcaagagttaaagctttatgtgctaagtatcctttatattaa

SEQ ID NO: 10470 - protein, 410 aa, Clostridium perfringens ATCC 13124
MNFDNLEREDEQIAHLVQKEKERQENSIELIASENFVSKAVMEAMGSYLTNKYAEGYPSKRYYGGCHVVDEVEDLARERVKKLFGAEHANVQPHSGSQANMAVYFSILEPGDTVLGMDLSHGGHLTHGSPVNFSGRLFNFVSYGVDKETETINYETVRELALKHKPKLIVAGASAYSRIIDFKTLREIADEVGAYLMVDIAHIAGLVATGLHPSPVPYADFVTSTTHKTLRGPRGGLILCKEKFAKALDKNIFPGIQGGPLMHIIAAKAVCFKEALEPSFKTYMEQVVKNAHVLAEALESYGFKLVSNGTDNHLILVDLTNKDITGKDAEILLDSIGITLNKNTVPNETRSPFVTSGVRIGTPAITTRGFKEEEMKEIASIINDAIKEKDGDLEPLKARVKALCAKYPLY

SEQ ID NO: 10471 - DNA, 1263 bp, Frankia alni ACN14a
  CDS (1)..(1263): transl_table=11
atgcacaatcccccgcttcccgaactcaccgtcgccgatcccgagctcgccgggctggtcgaggccgaggccgcccgccagcacgcgtcgatcaggctgatcgcctcggagaactacgtctccaccgcggtgctggaggcgtccggctccgtcctgaccaacaagtactccgaggggtacgtcggccggcggtactacgagggtcagcaggtcgtcgacccgatcgagacgctggccgtcgatcgggccaagtcgctgttcggcgtcgagcacgccaacgtccagccgtactccggctcgccggcgaacctggccgtctacctcgccttcgcccagcccggggacacggtcatgggcctgtcgctgccgatgggcggccacctgacgcacggctggagcgtgtcggcgaccggcaggtggttccgcagcgtccgctacgggctgcgcgcggacaccggccggatcgacctggacgaggtgcgcgacctggcccgcaccgagcggccgaagatcatcttctgtggcgggacggcgatcccgcggacgatcgacttcccggccttcgccgagatcgcgcgcgaggtgggcgcggtgctcgtcgccgacatcgcgcacatcgccgggctgatcgccggcggtgcccacccctccccggtcggccacgctccggtgatctcgaccaccacgcacaagacgctgcgcggcccgcgcggggccatgctgctcaccgacgccgagcacgccacggcgatcgacaaggcggtcttcccgggcctgcagggcggcccgcacaaccacaccacggcggccatcgcggtcgccctgcgggaggcctcgacgcccgcgttccgcgactacgcccacgcggtcgtggcgaacgcccgcgcgctggccgaggcactggtggagcgcgggttcgacctcgtcaccgggggcaccgacaaccacctcatcctcatcgacctcaccggcaaggacatcggcggaaagccggcggccaaggcgctcgacgcggcggggatcgagctgaactacaacgcggtgcccttcgacaagcgcaagccgttcgacccctccggcatccggctcggcaccgccgcgatcaccacccgcggtctgaccccggcgcacatgccggtgctcgccggctggatcgacgacgtcgtcaaggccgccggtgccggcgacaccgcgacgatcggccgggtccgggagcaggtcaccgagttggtcagcggcttcccgatgcccggtttcgcctga

SEQ ID NO: 10472 - protein, 420 aa, Frankia alni ACN14a
MHNPPLPELTVADPELAGLVEAEAARQHASIRLIASENYVSTAVLEASGSVLTNKYSEGYVGRRYYEGQQVVDPIETLAVDRAKSLFGVEHANVQPYSGSPANLAVYLAFAQPGDTVMGLSLPMGGHLTHGWSVSATGRWFRSVRYGLRADTGRIDLDEVRDLARTERPKIIFCGGTAIPRTIDFPAFAEIAREVGAVLVADIAHIAGLIAGGAHPSPVGHAPVISTTTHKTLRGPRGAMLLTDAEHATAIDKAVFPGLQGGPHNHTTAAIAVALREASTPAFRDYAHAVVANARALAEALVERGFDLVTGGTDNHLILIDLTGKDIGGKPAAKALDAAGIELNYNAVPFDKRKPFDPSGIRLGTAAITTRGLTPAHMPVLAGWIDDVVKAAGAGDTATIGRVREQVTELVSGFPMPGFA

SEQ ID NO: 10473 - DNA, 1248 bp, Ralstonia eutropha H16
  CDS (1)..(1248): transl_table=11
atgttcgaacgcagccgttttacgatcgaccagatcgaccccgaggtctttgccgccatccagcaggagaaccagcgtcaggaagaccacatcgagctgatcgcctccgagaactacacctcgccggccgtgatggccgcccagggttcgcagctgaccaacaagtacgccgagggctatcccggcaagcgctactacggcggttgcgagtacgtcgacgtcgtcgagcagctggccattgaccgcgtcaagcagctgttcggcgccgaagccgccaacgtgcaacccaactcgggctcgcaggccaaccagggcgtgtacttcgccgtgctcaagccgggcgacaccatcatgggcatgagcctggccgaaggcggccacctgacccacggcatggccctgaacatgagcggcaagtggttcaacgtggtcagctacggcctgaacgcccaggaagacatcgactacgacgcgctggaaaagctggcccaggagaagaagcccaagctgatcatcgccggcgcctcggccttcgcgctgcgcatcgacttcgagcgcatcagcaaggttgccaagtcgatcggcgcttacttcatggtcgacatggcccactacgccggcctgatcgccgcgggtgtctacccgaacccggtgccgcacgccgacttcgtcaccaccaccacgcacaagagcctgcgcggcccgcgcggcggcgtgatcctgatgaaggccgagcacgagaaggccatcaactcggcgatcttccccggcatccagggcggcccgctgatgcacgtaatcgccggcaaggccgtcgccttcaaggaagcgctgacgcctgagttcaaggaataccagcagcaagtggtgaagaacgccgccgtgctggccgagaccctgatcgcgcgcggcctgcgcatcgtctcgggccgcaccgaaagccacgtgatgctggttgacctgcgcgccaagaacatcaccggcaaggaagccgagcgcatcctgggcgaggcgcatatcaccgtcaacaagaacgccatccccaacgatccggaaaagccgttcgtgacctcgggcatccgcctgggctcgccggccatgaccacgcgcggcttcaaggaagaagaagcccgcatcgtcggcaacctgatcgccgatgtgctggacaacccgcacgacgccgccaatatcgccagcgtgcgcgagcaggcggcagccctgaccaagcgtttcccggtctacggctga

SEQ ID NO: 10474 - protein, 415 aa, Ralstonia eutropha H16
MFERSRFTIDQIDPEVFAAIQQENQRQEDHIELIASENYTSPAVMAAQGSQLTNKYAEGYPGKRYYGGCEYVDVVEQLAIDRVKQLFGAEAANVQPNSGSQANQGVYFAVLKPGDTIMGMSLAEGGHLTHGMALNMSGKWFNVVSYGLNAQEDIDYDALEKLAQEKKPKLIIAGASAFALRIDFERISKVAKSIGAYFMVDMAHYAGLIAAGVYPNPVPHADFVTTTTHKSLRGPRGGVILMKAEHEKAINSAIFPGIQGGPLMHVIAGKAVAFKEALTPEFKEYQQQVVKNAAVLAETLIARGLRIVSGRTESHVMLVDLRAKNITGKEAERILGEAHITVNKNAIPNDPEKPFVTSGIRLGSPAMTTRGFKEEEARIVGNLIADVLDNPHDAANIASVREQAAALTKRFPVYG

SEQ ID NO: 10475 - DNA, 1290 bp, Synechococcus sp. CC9311
  CDS (1)..(1290): transl_table=11
atgacagaccgttccgcagccccaattaatgcatctctgaaggctgcagaccctgccattgctggtttgatcgatcaagagcagatgcgtcaggagacgcatttggagttgatcgcatcggagaacttcacctccaaggcggtgatggaagctcagggttcggttctgacgaataaatacgccgaggggttgcctcacaagcgttactacggcggctgcgagcatgtggatgccattgaagaattggcaatcacacgagccaagcaactcttcggtgcggcttgggcgaatgttcagccccacagcggcgctcaggcgaactttgctgtgtttcttgccttgcttcagcccggtgacacgattcttgggatggacctcagtcatggggggcatctcacccatggctcaccggtgaatgtcagcggcaagtggttcaacgtggtccagtacggcgtggataaagagactcagcgcctcgacatggaggccatccgcaagctggctctcgagcacaagcccaagctgatcatttgcggatactcggcttacccgcgctcgattgactttgccgcgttccgttccattgcggatgaggtgggtgcgtacctgttggcagacatggcccatatcgccggcctcgtggcggctggggttcatgcaagtccagtccctcactgtgatgttgtgaccaccacgacgcataaaactcttcgcgggccccgtggtggcttgatcctgtgtcgcgatgcagagttcgcgcgtcgatttgataaggcggtgttccctggatcgcaaggtggtccgcttgaacacgtgattgcagccaaggctgtggctttcggcgaagcgttgcagcccgacttcaaagcctatagccgtcaggttgttgccaacgctcaggccctcgcagcccgtcttcaggagcgaaagattgatgtggtgagtggtggtacggataaccatgtggtgcttttggatctgcgcagcatcgggatgaccggaaaggtggctgatcttttggtgagtgatgtgcacatcacggccaataagaacacggttccatttgatcctgagtcccccttcgtgacgagtggtttgcgtttggggactgctgcccttaccacccgtggcttcgacgagaaggccttccacgaggttgctgatgtgatcgctgatcgccttcagaaccctgaagatgacgccattcaggcgcgttgcttggagcgagtcagtgatctttgcaagcggtttccgctctatgcccctgctttggaaccggctctcgcttga

SEQ ID NO: 10476 - protein, 429 aa, Synechococcus sp. CC9311
MTDRSAAPINASLKAADPAIAGLIDQEQMRQETHLELIASENFTSKAVMEAQGSVLTNKYAEGLPHKRYYGGCEHVDAIEELAITRAKQLFGAAWANVQPHSGAQANFAVFLALLQPGDTILGMDLSHGGHLTHGSPVNVSGKWFNVVQYGVDKETQRLDMEAIRKLALEHKPKLIICGYSAYPRSIDFAAFRSIADEVGAYLLADMAHIAGLVAAGVHASPVPHCDVVTTTTHKTLRGPRGGLILCRDAEFARRFDKAVFPGSQGGPLEHVIAAKAVAFGEALQPDFKAYSRQVVANAQALAARLQERKIDVVSGGTDNHVVLLDLRSIGMTGKVADLLVSDVHITANKNTVPFDPESPFVTSGLRLGTAALTTRGFDEKAFHEVADVIADRLQNPEDDAIQARCLERVSDLCKRFPLYAPALEPALA

SEQ ID NO: 10477 - DNA, 1254 bp, Shewanella sp. MR-7
  CDS (1)..(1254): transl_table=11
atgctgaaaaaagatatgaatatcgcagattatgatccggaactgttcaacgcaattcagaacgaaactctgcgtcaagaagagcatattgagctgattgcttctgaaaactacaccagtccacgcgtgatgcaagcgcaaggttcacaattaaccaacaagtacgccgaaggttaccctggcaagcgttactacggtggttgtgagtatgtggacgtagttgaaaccttagcgattgagcgtgcaaaacaactgtttggtgcgacttacgcaaacgtgcaacctcactcaggttctcaagcaaacagcgccgtttacatggcattgttaaaaccaggcgataccgttttaggtatgaacctcgctcacggtggtcacttgacccacggttcacctgtaaacttctccggtagactgtacaacatcattccttacggcatcgacgaatcaggcaaaatcgactatgacgaaatggaacgtctggcggttgaacataagcctaagatgatgatcggtggtttctctgcttactcaggcatcgttgactgggcaagaatgcgcgaaatcgcagacaaaatcggtgcttacctgtttgtcgacatggcgcacgttgcgggtcttatcgccgcgggtgtgtatccaaacccagtgccacacgcgcacgttgtgacctctactactcacaagaccttagctggtcctcgtggcggtatcattctgtctgctgccgatgatgaagagctatacaaaaagctaaactcagcggtattcccaggcggtcaaggcggtcctttgatgcacgttatcgcgggtaaagcggtcgccttcaaagaagctttagagccagagttcaaagcttaccaacaacaagtggttaagaacgctaaagccatggttgaagtgttcttagagcgcggttacaagatcgtttctggcggtactgacaaccacttaatgctggtggacttaattggtcgcgacctgacgggtaaagaagccgatgccgctttaggtagcgcgaacatcacagtaaacaaaaactctgtgccaaacgatccacgttctccattcgtgacctctggtgtacgtattggtacgcctgcgatcactcgccgtggctttaaagaagctgaagcgaaagagttaaccggttggatctgtgacatcctcgacgatgcccacaacccagcggttatcgagcgcgtaaaaggccaagtattggcactgtgcgcccgtttccctgtttacggttaa

SEQ ID NO: 10478 - protein, 417 aa, Shewanella sp. MR-7
MLKKDMNIADYDPELFNAIQNETLRQEEHIELIASENYTSPRVMQAQGSQLTNKYAEGYPGKRYYGGCEYVDVVETLAIERAKQLFGATYANVQPHSGSQANSAVYMALLKPGDTVLGMNLAHGGHLTHGSPVNFSGRLYNIIPYGIDESGKIDYDEMERLAVEHKPKMMIGGFSAYSGIVDWARMREIADKIGAYLFVDMAHVAGLIAAGVYPNPVPHAHVVTSTTHKTLAGPRGGIILSAADDEELYKKLNSAVFPGGQGGPLMHVIAGKAVAFKEALEPEFKAYQQQVVKNAKAMVEVFLERGYKIVSGGTDNHLMLVDLIGRDLTGKEADAALGSANITVNKNSVPNDPRSPFVTSGVRIGTPAITRRGFKEAEAKELTGWICDILDDAHNPAVIERVKGQVLALCARFPVYG

SEQ ID NO: 10479 - DNA, 1254 bp, Shewanella frigidimarina NCIMB 400
  CDS (1)..(1254): transl_table=11
atgttgaagaaagcgatgaatattgcggattatgatccagaattatttaaagccattgaagatgaaacttgtcgtcaagaagaacacattgaattgattgcgtctgaaaactataccagtccacgtgtgatggaagcgcaaggttcacagttaactaacaagtatgctgaaggttatccaggcaagcgttattatggtgggtgcgaatacgttgatgttgttgaaacattggctattgaacgcgcaaaagaattatttggtgcaacttatgccaacgtacagcctcactcaggctcgcaagcaaacagcgcagtatttatggcgttgttacaaccgggtgataccgttttagggatgaaccttgctcatggtggtcatttgacccatggttcaccagtgaatttttctggcaagctttacaacatcattccttacggtatcgatgaagctggcaaaattgattatgacgaaatggaacgcttagccattgagcataagcctaaaatgattatcggcggattctctgcattctcaggtattgttgattgggcaagaatgcgcgaaattgcagacaaaattggtgcatacttatttgttgatatggcacacgtagcaggcttaattgctgctggtgtttatccaacgccagttcctcatgcacacgtggttacgtctacaactcataaaacattagcgggtcctcgtggcgggattattatttctgcagccgatgatgaagtgttgtataagaagttgaactcagcggtattcccgggtggccaaggtggtcctttaatgcatgttatcgcgggtaaagcggttgcatttaaagaagcattagagccagaattcaaagtataccagcagcaagtggttaaaaacgcgaaagccatggttgaagtgtttttagctcgcggttataaaatcgtttctggcggtactgaaaaccatctaatgttggttgacttaattggtcgtgatttaaccggtaaagaagctgatgccgcattaggcagcgcaaacattactgttaataaaaactctgtgcctaacgatcctcgttcaccgtttgttacctctggtatccgtattggttcgccagcaatcactcgtcgtggctttaaagaagcagaagcgaaagaattgaccggttggatttgtgacattcttgatgatgcaactaatactgttgtaaccgaccgcgtcaaaggccaagttttagccttatgtgctcgattccctgtatacggttaa

SEQ ID NO: 10480 - protein, 417 aa, Shewanella frigidimarina NCIMB 400
MLKKAMNIADYDPELFKAIEDETCRQEEHIELIASENYTSPRVMEAQGSQLTNKYAEGYPGKRYYGGCEYVDVVETLAIERAKELFGATYANVQPHSGSQANSAVFMALLQPGDTVLGMNLAHGGHLTHGSPVNFSGKLYNIIPYGIDEAGKIDYDEMERLAIEHKPKMIIGGFSAFSGIVDWARMREIADKIGAYLFVDMAHVAGLIAAGVYPTPVPHAHVVTSTTHKTLAGPRGGIIISAADDEVLYKKLNSAVFPGGQGGPLMHVIAGKAVAFKEALEPEFKVYQQQVVKNAKAMVEVFLARGYKIVSGGTENHLMLVDLIGRDLTGKEADAALGSANITVNKNSVPNDPRSPFVTSGIRIGSPAITRRGFKEAEAKELTGWICDILDDATNTVVTDRVKGQVLALCARFPVYG

SEQ ID NO: 10481 - DNA, 1248 bp, Syntrophomonas wolfei subsp. wolfei str. Goettingen
  CDS (1)..(1248): transl_table=11
atggattatattcaagagtatgttaagccggttgacccagaagtggcggaagccattgaaaaggaagaggccaggcaaaacaacaaattggaactaattgcttcggaaaactttgtatcccgtgctgttatggctgcccagggttcggtgatgaccaataaatatgccgaaggtttacctggggccaggtattatggtggttgcgaatatgtggacatagtagaagaactggcccgggacagggtaaaagagattttcggagctgaacatgccaatgtgcaaccccattccggcgcccaagctaatacagcggtatattttgcggcgttgcagccgggacaaaccatcatgggtatgaatctaaatcatgggggacatcttactcacggcagtaaagtgaatatatccgggaagtatttcaatattgtggactatggggttaacagggatacagagagaattgattatgaagagttacgagaaatagcgctaaaagctcgtccccaaatgattgtggccggagccagtgcttacccccggattttggattttaaaaagttccgggaaatcgctgatgaagccggggctcttctttttgttgatatggcccacatcgctggtctggtagctgcaggccttcatcccagcccggttccctatgccgattttgtatcctctaccactcacaaaactttgcgtggaccccggggaggatttattttatgccggcaagaatgggccaacaaaatagacaaagcggttttccccggcatacagggagggcctttgatgcatgtaatagcagccaaggccgtttgcttcaaagaggctcttacgccggaatttaaagcctatcagcaggatattgttaacaatgccgctatattggcaaaggctttgatggagcagggtttacgtgtggtatcaggaggaacggacaatcacctcatgttagtggatgtccgtcccaaaggacttaatggccgggatgccgaagccattctggaatccataaatataaccgtaaacaaaaatgctatcccctttgatccagagaagccgactgttaccagtggcatccgggtaggaactccagcggttaccagccgggcgctaaaaggagacgatatgagggaattggcccgggctataaccctggtactggacaagcatgacagcgaggaagtaaaggaagaagcccggaggatagtaaaagctctctgtgataagtatccactgtatacctag

SEQ ID NO: 10482 - protein, 415 aa, Syntrophomonas wolfei subsp. wolfei str. Goettingen
MDYIQEYVKPVDPEVAEAIEKEEARQNNKLELIASENFVSRAVMAAQGSVMTNKYAEGLPGARYYGGCEYVDIVEELARDRVKEIFGAEHANVQPHSGAQANTAVYFAALQPGQTIMGMNLNHGGHLTHGSKVNISGKYFNIVDYGVNRDTERIDYEELREIALKARPQMIVAGASAYPRILDFKKFREIADEAGALLFVDMAHIAGLVAAGLHPSPVPYADFVSSTTHKTLRGPRGGFILCRQEWANKIDKAVFPGIQGGPLMHVIAAKAVCFKEALTPEFKAYQQDIVNNAAILAKALMEQGLRVVSGGTDNHLMLVDVRPKGLNGRDAEAILESINITVNKNAIPFDPEKPTVTSGIRVGTPAVTSRALKGDDMRELARAITLVLDKHDSEEVKEEARRIVKALCDKYPLYT

SEQ ID NO: 10483 - DNA, 1296 bp, Burkholderia ambifaria AMMD
  CDS (1)..(1296): transl_table=11
atgtactcggccgcaccggtcaacctgtacacacttaacggaaaccgtatgtttgacagagcccaaagcaccatcgcgaacgtcgatcccgaactctttgctgcgatcgagcaggaaaaccgccgccaggaagatcacatcgagctgatcgcgtcggaaaactacacgagcccggccgtgatggccgcccagggctcgcagctcacgaacaagtacgcggaaggttatccgggcaagcgctactacggcggctgtgaatacgtcgatgtggtcgagcagctggcgatcgaccgtgtgaagcagctgttcggcgcggaagccgcgaacgtgcagccgaactcgggttcgcaggcgaaccagggcgtgttcttcgcgatgctcaagccgggcgacacgatcatgggcatgagcctcgcgcacggtggtcacctgacgcacggctcgccggtgaacatgtcgggcaagtggttcaacgtggtgagctacggtctgaacgagcaggaagacatcgactacgacgcggccgagcagctcgcgcaggaacacaagccgaagctgatcgtcgcgggtgcatcggcgttcgcgctgaagatcgacttcgagcgtctggcgaagatcgcgaagtcggtcggtgcatacctgatggtcgacatggcgcactacgcgggcctgatcgcggcgggcgtgtatccgaacccggtgccgcacgccgacttcgtgacgacgacgacgcacaagagcctgcgcggcccgcgcggtggcgtgatcctgatgaagtcggaatacgagaagccgatcaactcggcgatcttcccgggcatccagggtggcccgctgatgcacgtgatcgcggcgaaggccgtggcgttcaaggaagcgctgtcgccggaattcaaggcgtaccaggaaaaggtggtcgagaacgcgcgcgtgctggctgaaacgctggtcaagcgcggcctgcggatcgtgtcgggccgcaccgaaagccacgtgatgctggtggacctgcgcgcgaagaacatcacgggcaaggcagcggaagcagcgctcggtgccgcgcacatcacggtgaacaagaacgcgatcccgaacgatccggagaagccgttcgtgacgagcggcatccgtctgggttcgccggcgatgacgacgcgcggctttggcccggcggaagcggaactggtcggcaacctgatcgccgacgtgctcgagaatccggaagatgcagcgacgatcgagcgcgtgcgcacgcaagtggccgagctgaccaagcgtttcccggtctatcgctga

SEQ ID NO: 10484 - protein, 431 aa, Burkholderia ambifaria AMMD
MYSAAPVNLYTLNGNRMFDRAQSTIANVDPELFAAIEQENRRQEDHIELIASENYTSPAVMAAQGSQLTNKYAEGYPGKRYYGGCEYVDVVEQLAIDRVKQLFGAEAANVQPNSGSQANQGVFFAMLKPGDTIMGMSLAHGGHLTHGSPVNMSGKWFNVVSYGLNEQEDIDYDAAEQLAQEHKPKLIVAGASAFALKIDFERLAKIAKSVGAYLMVDMAHYAGLIAAGVYPNPVPHADFVTTTTHKSLRGPRGGVILMKSEYEKPINSAIFPGIQGGPLMHVIAAKAVAFKEALSPEFKAYQEKVVENARVLAETLVKRGLRIVSGRTESHVMLVDLRAKNITGKAAEAALGAAHITVNKNAIPNDPEKPFVTSGIRLGSPAMTTRGFGPAEAELVGNLIADVLENPEDAATIERVRTQVAELTKRFPVYR

SEQ ID NO: 10485 - DNA, 1257 bp, Pseudomonas aeruginosa UCBPP-PA14
  CDS (1)..(1257): transl_table=11
atgttcagcaagcacgaccagctccagggctacgacgacgaactgctcgccgcgatggacgccgaagaccggcggcaggaagaccacatcgaactgatcgcctcggagaactacgccagcaagcgggtcatgcaggcgcagggcagcggcctgaccaacaagtatgccgagggctatccgggcaagcgctactacggcggctgcgaacacgtcgacaaggtcgagcggctggccatcgaccgcgccaggcagctgttcggcgccgactacgccaacgtccagccgcattccggttcctcggccaacgccgcggtgtacctggcgctgctcaacgccggcgacaccatcctcggcatgagcctggcccatggcggccatctcacccatggcgccaaggtgtcgtcctccggcaagctgtacaacgccgtgcagtacggcctggacaccgctaccgggctgatcgactacgacgaagtcgagcgcctggccgtggagcataagccgaagatgatcgtcgccggcttctccgcctactccaagaccctcgacttcccgcgcttccgcgccatcgccgacaaggtcggcgcgctgctgttcgtcgacatggcccacgttgccgggctggtcgccgccggcctctacccgaacccgatccccttcgccgacgtggtcaccaccaccacccacaagaccctgcgcggtccgcgcggcggtctgatcctggcgcgcgccaacgaggagatcgagaagaagctcaactccgcggtattccccggcgcccagggcggcccgctgatgcacgtgatcgcggccaaggcggtgtgcttcaaggaagcgctggagccgggcttcaaggactaccaggcgcaggtgatccgcaacgccaaggcgatggccgaggtgtttatcgggcgcggctacgacgtggtttccggtggcaccgacaaccacctgatgctgatcagcctggtgaagcaggggctgaccggcaaggccgccgacgcggcgctcggagcggcgcacatcacggtgaacaagaacgccgtgccgaacgatccacagagcccgttcgtcacctccggcatccgcatcggcaccccagcggtgaccactcgcggtttccgcgagggcgagtgccgcgaactggctggctggatctgcgacatcctcgacgatatcgacaatcccgaggtcggcgaacgggtcaggggccaggtcggcgaattctgccggcacttcccggtctacgctgattga

SEQ ID NO: 10486 - protein, 418 aa, Pseudomonas aeruginosa UCBPP-PA14
MFSKHDQLQGYDDELLAAMDAEDRRQEDHIELIASENYASKRVMQAQGSGLTNKYAEGYPGKRYYGGCEHVDKVERLAIDRARQLFGADYANVQPHSGSSANAAVYLALLNAGDTILGMSLAHGGHLTHGAKVSSSGKLYNAVQYGLDTATGLIDYDEVERLAVEHKPKMIVAGFSAYSKTLDFPRFRAIADKVGALLFVDMAHVAGLVAAGLYPNPIPFADVVTTTTHKTLRGPRGGLILARANEEIEKKLNSAVFPGAQGGPLMHVIAAKAVCFKEALEPGFKDYQAQVIRNAKAMAEVFIGRGYDVVSGGTDNHLMLISLVKQGLTGKAADAALGAAHITVNKNAVPNDPQSPFVTSGIRIGTPAVTTRGFREGECRELAGWICDILDDIDNPEVGERVRGQVGEFCRHFPVYAD

SEQ ID NO: 10487 - DNA, 1254 bp, Pseudomonas aeruginosa UCBPP-PA14
  CDS (1)..(1254): transl_table=11
atgttcagccgtgatttgaccctcgcccgctacgatgccgaactctttgccgcgatggagcaggaagcccagcgccaggaagagcacatcgagctgatcgcctccgagaactacaccagcccggcggtgatggaagcccagggttcggtgctgaccaacaagtacgccgaaggttatccgcacaagcgctactacggcggctgcgagtacgtcgatatcgtcgagcaactggccatcgaccgcgccaagcaactgttcggcgccgattacgccaacgtccagccgcacgccggctcccaggccaacgccgcggtctacctggccctgctgtcggccggcgacaccatcctcggcatgagcctggcccacggcggccacctgacccacggcgccagcgtctcctcctccggcaagctgtacaacgccgtgcagtacggcatcgacgccaatggcctgatcgactacgacgaagtcgagcgcctggccgtggagcacaagccgaagatgatcgtcgccggcttctccgcctattcccaggtcctcgatttcgcccgcttccgcgccatcgccgacaaggtcggcgcctacctgttcgtcgacatggcccacgtcgccggcctggtcgccgctggcgtctacccgaacccggtgccgttcgccgacgtggtcaccaccaccacccacaagaccctgcgcggtccgcgcggtggcctgatcctggcgcgcgccaacgaggagatcgagaagaagctcaactccgcggtattccccggcgcccagggcggtccgctggagcacgtgatcgcggccaaggcggtgtgcttcaaggaagccctgcagccggagttcaagacctaccagcagcaggtcctgaagaacgcccagaccatggcccaggtcttcctcgaccgcggtttcgacgtggtttccggcggcacccagaaccacctgttcctgctctccctgatcaagcaggacatcaccggcaaagacgccgacgccgccctcggccgcgcgttcatcaccgtgaacaagaactcggtcccgaacgacccgcgctcgccgttcgtcacctccggcctgcgcatcggtaccccggccgtgaccacccgcggcttcaaggaagccgagtgccgcgagctggccggctggatctgcgacatcctcgagaacatgggcgacgagtccgtggtcaacggcgtacgcgagaaggtcaaggcgatctgcgccaagttcccggtctacggcaactaa

SEQ ID NO: 10488 - protein, 417 aa, Pseudomonas aeruginosa UCBPP-PA14
MFSRDLTLARYDAELFAAMEQEAQRQEEHIELIASENYTSPAVMEAQGSVLTNKYAEGYPHKRYYGGCEYVDIVEQLAIDRAKQLFGADYANVQPHAGSQANAAVYLALLSAGDTILGMSLAHGGHLTHGASVSSSGKLYNAVQYGIDANGLIDYDEVERLAVEHKPKMIVAGFSAYSQVLDFARFRAIADKVGAYLFVDMAHVAGLVAAGVYPNPVPFADVVTTTTHKTLRGPRGGLILARANEEIEKKLNSAVFPGAQGGPLEHVIAAKAVCFKEALQPEFKTYQQQVLKNAQTMAQVFLDRGFDVVSGGTQNHLFLLSLIKQDITGKDADAALGRAFITVNKNSVPNDPRSPFVTSGLRIGTPAVTTRGFKEAECRELAGWICDILENMGDESVVNGVREKVKAICAKFPVYGN

SEQ ID NO: 10489 - DNA, 1248 bp, Burkholderia cenocepacia HI2424
  CDS (1)..(1248): transl_table=11
atgtttgacagagcccaaagcaccatcgcgaacgtcgatcccgaaatctttgcagcgatcgagcaggaaaaccgccgccaggaagatcacatcgagctgatcgcgtcggaaaactacacgagcccggccgtgatggccgcgcagggctcgcagctcacgaacaagtacgcggaagggtatccgggcaagcgctactacggcggttgcgagtacgtcgacgtggtcgagcaactggcgatcgaccgtgtgaagcagctgttcggtgcggaagcggcgaacgtgcagccgaactcgggttcgcaggcgaaccagggcgtgttcttcgcgatgctcaagccgggcgacacgatcatgggcatgagcctcgcgcacggcggccacctgacgcacggctcgccggtgaacatgtcgggcaagtggttcaacgtggtgagctacggcctgaacgaaaacgaagacatcgactacgaagcggccgagaagctcgcgcaggaacacaagccgaagctgatcgtcgcgggcgcgtcggcgtttgcgctgaagatcgatttcgagcgtctggcgaagatcgcgaagtcggtgggcgcgtacctgatggtcgacatggcgcactacgctggcctgatcgcggcgggcgtgtacccgaacccggtgccgcacgcggatttcgtgacgacgacgacgcacaagagcctgcgcggcccgcgcggcggcgtgatcctgatgaaggccgagtacgagaagccgatcaactcggcgatcttcccgggcatccagggcggcccgctgatgcacgtgatcgcggcgaaggcggtggcgttcaaggaagcgctgtcgccggagttcaaggaatatcagcagaaggtggtcgagaacgcacgcgtgctggccgaaacgctggtcaagcgcgggctgcggatcgtgtcgggccgcaccgaaagccacgtgatgctggtcgacctgcgcgcgaagaacatcacgggcaaggcagcggaagcggcactcggcgcggcgcacatcacggtgaacaagaacgcgatcccgaacgatccggaaaagccgttcgtgacgagcggcgtgcgcctgggttcgccggcgatgacgacgcgtggcttcgggccggcggaagccgagcaggtgggtaacctgatcgccgacgtgctggagaacccggaggacgcagcgacgatcgagcgcgtgcgtgcgcaggtcgccgagctgaccaagcgtttcccggtctatcgctga

SEQ ID NO: 10490 - protein, 415 aa, Burkholderia cenocepacia HI2424
MFDRAQSTIANVDPEIFAAIEQENRRQEDHIELIASENYTSPAVMAAQGSQLTNKYAEGYPGKRYYGGCEYVDVVEQLAIDRVKQLFGAEAANVQPNSGSQANQGVFFAMLKPGDTIMGMSLAHGGHLTHGSPVNMSGKWFNVVSYGLNENEDIDYEAAEKLAQEHKPKLIVAGASAFALKIDFERLAKIAKSVGAYLMVDMAHYAGLIAAGVYPNPVPHADFVTTTTHKSLRGPRGGVILMKAEYEKPINSAIFPGIQGGPLMHVIAAKAVAFKEALSPEFKEYQQKVVENARVLAETLVKRGLRIVSGRTESHVMLVDLRAKNITGKAAEAALGAAHITVNKNAIPNDPEKPFVTSGVRLGSPAMTTRGFGPAEAEQVGNLIADVLENPEDAATIERVRAQVAELTKRFPVYR

SEQ ID NO: 10491 - DNA, 1236 bp, Syntrophobacter fumaroxidans MPOB
  CDS (1)..(1236): transl_table=11
atgtccacgctcgaacgcatcgatcctgaaattgccgatgtgatctgtgaggaggaaaagagacagcgcggcaagttggagctcatcgcttccgagaatttcgtcagcgaggcggttcgtgaagctcagggctcagtcctgacgaacaaatacgcggaaggttaccccggaaagcgatattacggcggctgcgagttcgtggacatggccgaaagactggcgcaggaaagagccaagaaactcttcgacgcggaatatgcgaacgtgcagcctcattccggttcccaggccaatatggccatattcttcgccgtcctccagcccggcgataccgttctcggcatggaccttcgtcagggaggtcatctcacgcacggaagccctgtaagcttctcgggcaaactctataacgtcgtgtcgtacggcgtccggaaagacaccgaacagatcgacttcgaccaggtcgcgcgactggcgcgcgagcaccgccccaagctgatcattgcgggagccagcgcttatccgcgcatcatcgattttgcccgcttcgggcaaatcgccaaggaaatcgccgcgtacctcatggtcgacatggcccacatcgcaggcctcgtctgctccggtcttcatcccagcccggtgccgcacgccgacttcgtgacttccaccacgcacaagacgctcaggggaccccggggaggactgatcctttcccattcgaattacaccaggcttctcgacagccagatctttcccggtatccaaggcggcccgctgatgcacgttattgcggccaaggccgttgccttccgcgaagcactccagccctccttcaaggaataccagcagcgggtggtggccgacgccgcggccttggcgcaagagctgaaggcgctggggtaccggctggtttccgggggcaccgacaatcacttgatgctcgtcgacctcacgcctcagggcgtcaccggcagggtcgccgaagaaacgttggacaaggccggaataaccgtgaacaaaaattccatcccgttcgatcagcagaaaccccaggtcaccagcggtatccgcatcgggactccggctctggctacgaggggaattttgccccatcacatgaaagcggtggccggattcatgcaccggggtctgaaatcggcgggagacgaaccggctctggcgcgcctccgggccgaagttgccgagttctgttcggcgtttcccctgttttcgtga

SEQ ID NO: 10492 - protein, 411 aa, Syntrophobacter fumaroxidans MPOB
MSTLERIDPEIADVICEEEKRQRGKLELIASENFVSEAVREAQGSVLTNKYAEGYPGKRYYGGCEFVDMAERLAQERAKKLFDAEYANVQPHSGSQANMAIFFAVLQPGDTVLGMDLRQGGHLTHGSPVSFSGKLYNVVSYGVRKDTEQIDFDQVARLAREHRPKLIIAGASAYPRIIDFARFGQIAKEIAAYLMVDMAHIAGLVCSGLHPSPVPHADFVTSTTHKTLRGPRGGLILSHSNYTRLLDSQIFPGIQGGPLMHVIAAKAVAFREALQPSFKEYQQRVVADAAALAQELKALGYRLVSGGTDNHLMLVDLTPQGVTGRVAEETLDKAGITVNKNSIPFDQQKPQVTSGIRIGTPALATRGILPHHMKAVAGFMHRGLKSAGDEPALARLRAEVAEFCSAFPLFS

SEQ ID NO: 10493 - DNA, 1242 bp, Listeria welshimeri serovar 6b str. SLCC5334
  CDS (1)..(1242): transl_table=11
atggtctatttacaaaagcaagataaggaagtttttgatgcaattaagttagagcttggtagacaacgcgcgaatattgaattaatcgcatctgagaattttgttagtgagcaagtaatggaagcaatgggttctgtattaacgaataaatatgcagaaggctacccaggaaaacgttactacggcggatgtgaattcgtggatatcgtggaggatttagcacgtgaccgagcgaaaaaattatttggcgctgaatatgcgaacgtccaaccgcactcaggcgctcaagcgaacatggcagtgtatcatgcagttcttgaaccaggcgatacagtgctcggtatgaatctttcacatggtggtcatttaactcatggtagtccagtgaattttagtggtgttttatacaattttgttgaatacggtgttcgtgaagacacaaaagaaattgactatgatattgtccgtgaagctgctctaaaacataaaccaaaaatgattgtagctggtgcaagtgcttatccacgtaaaattgattttgctaagttccgtgaaattgctgatgaagtgggcgcatacttaatggttgatatggcgcatattgctggtcttgttgctgctggtttacaccaaaatccagttccttatgctgatttcacaacgacaacaacccataaaacccttcgtggacctcgtggcggaatgattttagcaaaagctgaatgggaacaaaaattaaacaaatcaattttcccaggaattcaaggtggacctttgatgcacgttatcgcagcgaaagcagtagcatttggtgaagctttacaaccagaattcactacatactgcgagcaaattattcgtaactctaaaaaattagcagaaacactacaagctcatgatgtgactgttttaactggtggatcagacaatcatttattattaattgatttaaaacctctaagcttaacaggaaaagctgttgagaaagtgttagatgaagttggcattactgtaaacaaaaatactattccatttgaaacagaaagtccatttgtaacaagtggtatacgtgtaggtgttgctgcagtgacaactcgtggattcgatgaagtagctattgaaaaagtcggcgtacttatttcagaagtgttgcataacatagaaaatgaagaagttctcgcagatgtaaaagcacgtgtggcgactttaacaaatgagtacccactttatccaagtttataa

SEQ ID NO: 10494 - protein, 413 aa, Listeria welshimeri serovar 6b str. SLCC5334
MVYLQKQDKEVFDAIKLELGRQRANIELIASENFVSEQVMEAMGSVLTNKYAEGYPGKRYYGGCEFVDIVEDLARDRAKKLFGAEYANVQPHSGAQANMAVYHAVLEPGDTVLGMNLSHGGHLTHGSPVNFSGVLYNFVEYGVREDTKEIDYDIVREAALKHKPKMIVAGASAYPRKIDFAKFREIADEVGAYLMVDMAHIAGLVAAGLHQNPVPYADFTTTTTHKTLRGPRGGMILAKAEWEQKLNKSIFPGIQGGPLMHVIAAKAVAFGEALQPEFTTYCEQIIRNSKKLAETLQAHDVTVLTGGSDNHLLLIDLKPLSLTGKAVEKVLDEVGITVNKNTIPFETESPFVTSGIRVGVAAVTTRGFDEVAIEKVGVLISEVLHNIENEEVLADVKARVATLTNEYPLYPSL

SEQ ID NO: 10495 - DNA, 1254 bp, Aeromonas hydrophila subsp. hydrophila ATCC 7966
  CDS (1)..(1254): transl_table=11
atgttgaaacgtgacatgaccattgccggctatgatccagagctgtggcaggccatcacagacgagacccgtcgtcaggaagagcatatcgagctgattgcgtccgagaactacaccagcccccgtgtcatggaagcccagggctcccagctgaccaacaagtacgccgagggttacccctccaagcgttactacggtggttgcgagtatgtggatgtggttgaaaccctggctatcgagcgcgccaaagagctgttcggtgccacctacgccaacgtgcagccgcactccggctcccaggccaacagcgccgtctacatggccctgctgcagccgggcgacaccgtgctgggcatgaatctggcccacggcggtcacctgacccacggctccccggtcaacttctccggcaagctgtacaacatcatcccctacggcatcgatgagtccggcaagatcgactatgacgacatggaacgtcaggcggtcgagcacaagccgaagatgatgatcggtggcttctccgcctactccggcatcgttgattgggctcgcatgcgggaaatcgccgacaaggtcggtgcctggctgttcgtcgacatggcccacgtggccggcctcatcgccgctggcgtctacccgaacccggtgccccacgctcacgtggttacctccactacccacaagaccctggctggtccgcgcggtggtctgatcctctccgccgccgacgacgaggagctctacaagaagctcaactccgccgtcttcccgggtggtcagggtggcccgctgatgcacgtcatcgccggtaaagcggtggccttcaaagaggcgctggaacccgagttcaagacctaccaggctcaggtcgtgaaaaacgccaaggcaatggctgcgaccttcatcgagcgcggctacaagatcgtctccggcggtaccgacaaccatctgatgctggttgacctgatcggccgcgagctgaccggcaaagaggccgatgcggcccttggtaaagccaacatcaccgtcaacaagaactccgtgcccaacgacccgcgctccccgttcgtcacctccggtgtgcggatcggtaccccggccatcacccgccgtggtttcaaggaagccgagtccatccagctgaccaactggatctgcgacgtgctggacaatcacgacaacgatgccgtgctggccaccgtacgtgaacaggtgctggacatctgccgtcgtttcccggtgtatgcctga

SEQ ID NO: 10496 - protein, 417 aa, Aeromonas hydrophila subsp. hydrophila ATCC 7966
MLKRDMTIAGYDPELWQAITDETRRQEEHIELIASENYTSPRVMEAQGSQLTNKYAEGYPSKRYYGGCEYVDVVETLAIERAKELFGATYANVQPHSGSQANSAVYMALLQPGDTVLGMNLAHGGHLTHGSPVNFSGKLYNIIPYGIDESGKIDYDDMERQAVEHKPKMMIGGFSAYSGIVDWARMREIADKVGAWLFVDMAHVAGLIAAGVYPNPVPHAHVVTSTTHKTLAGPRGGLILSAADDEELYKKLNSAVFPGGQGGPLMHVIAGKAVAFKEALEPEFKTYQAQVVKNAKAMAATFIERGYKIVSGGTDNHLMLVDLIGRELTGKEADAALGKANITVNKNSVPNDPRSPFVTSGVRIGTPAITRRGFKEAESIQLTNWICDVLDNHDNDAVLATVREQVLDICRRFPVYA

SEQ ID NO: 10497 - DNA, 1275 bp, Gramella forsetii KT0803
  CDS (1)..(1275): transl_table=11
atgcaacgagacacccaggtatttgatttaattgctaaagaaaaggagcgccagttaaatggtttggaacttattgcgagtgaaaattttgtaagcgaagctgtgcttgaagcagcaggatctgtacttacaaataaatatgctgaaggttaccccggaaagagatattatggcggatgtgaggtggtagaccaggtagaacaacttgcaatagatcgtctaaaggaattgtttaatgctgaatatgccaatgtgcagccacattctggttcacaggcaaatacggcagtttttcatacggtgatgaagccgggagataaatttctaggttttgatctttcacatggaggacacttaacccacggttccccggtgaatttctcgggtaaactttataatcctgttttttacggagttgataaagaaaccggtttaattgattatgatgcagttgctgaaattgctgaaaaagaaaagcctaaaatgatcatcgcaggagcgtctgcatattcaagagagatcgattataaaagatttagagagattgctgatagcgttggtgctattttggtggcagatatggcgcatcccgcagggcttattgctaagggattaattagtgatccgcttcctcattgtcatattgtaacttctaccacccataaaacacttagaggacccagaggaggaatcatattgatgggaaaagactttgagaatccatttggagagaaattaaaaaatggaaacctgaagaaaatgtctacgatgctaaattcagggatttttccaggaaaccagggtggacctttagagcatattattgcagccaaagcaatagcttttggagaagctttgaccgatgaatttcttcattatactgttcaggttaagaaaaatgctgagaaactagctcaggcatttgttgaaaaagattataaagttatttccggtggaaccgataaccatatgatgcttatagatcttagaaataagaatgtgagtggtaaggaagcggaagaagctttaagtaaagcagatatcacggttaataaaaatatggtgccatttgatgataaatcaccttttgtgacatcaggtattagaattggaactccggcagttaccactcgtggattacaggaaaacgatatgaataagatcgttgatcttatagatcgtgtaatcaccaatattgaaaatgatactgaacttgaagcagtaaaaaaagaggtgaattctatgatgagtggaaggcctttgtttgttgcttaa

SEQ ID NO: 10498 - protein, 424 aa, Gramella forsetii KT0803
MQRDTQVFDLIAKEKERQLNGLELIASENFVSEAVLEAAGSVLTNKYAEGYPGKRYYGGCEVVDQVEQLAIDRLKELFNAEYANVQPHSGSQANTAVFHTVMKPGDKFLGFDLSHGGHLTHGSPVNFSGKLYNPVFYGVDKETGLIDYDAVAEIAEKEKPKMIIAGASAYSREIDYKRFREIADSVGAILVADMAHPAGLIAKGLISDPLPHCHIVTSTTHKTLRGPRGGIILMGKDFENPFGEKLKNGNLKKMSTMLNSGIFPGNQGGPLEHIIAAKAIAFGEALTDEFLHYTVQVKKNAEKLAQAFVEKDYKVISGGTDNHMMLIDLRNKNVSGKEAEEALSKADITVNKNMVPFDDKSPFVTSGIRIGTPAVTTRGLQENDMNKIVDLIDRVITNIENDTELEAVKKEVNSMMSGRPLFVA

SEQ ID NO: 10499 - DNA, 1284 bp, Acidothermus cellulolyticus 11B
  CDS (1)..(1284): transl_table=11
atgaattcatcccctgaccctctcgccgctctcaccgccacggatcccacgatcgctgacctgatccgggccgaagaacggcggcagtccgagaaaattcggctgattccgtcggagaactacgtctccaaagcggtcctggaggcgacggggacggtgctcaccaacaagtactccgagggttacccgaaccgccgctattacgaagggcagcaattcatcgatcagatcgagacgattgccatcgagcgggccaaacagctgttcggggttgatcacgccaatgtgcagccgtactccggatctcccgcgaacctggccatttacctggccctgctctcccccggcgacaccgtcatgggcatggcgttgccgatgggcggacacctcacccacggctggcccgtatcggccaccggcatctggttccgctcggtccaatacggcgtgcggcgcgacaccggtcgcattgatttcgatgaggtccgcgaggtggcccggcgagagcggccgaaggtaattttcgccggcgggacggcgattccgcgcatcatcgatttcgccgcgttcgcagagatcgcccgcgaagtgaacgctgtcctcgtcgccgatatcgcgcacatctccgggctcgtcgccggcggggtgcacccgtcgccggtgggacatgccgacatcatttccaccaccacgcacaagacgcttcgcggtccgcgcggtgcgatgctgatgagcaccgagcagtatgcgaaagcgctggacaaggcggtcttcccaggattgcagggtggcccgcacaatcacaccacggcggctatcgcggttgccctcctcgaggcgatgcaacccgaattccgcgactacgcccggaacatcgtcgccaacgcggccgttctcgccgaggagctcctcgcccgtggcttcgaccttgtctccggcggcaccgacaatcacctcatcctggtggacctcacctcaaaaggtgtggcgggcaagccggttgcgcgggccctcgaccgggccggcatcgaactcaactacaacaccgtgccgttcgaccctcgcaagccgtttgacccgtcgggaatccggctcggcaccccggcggtgacgtcccgcggaatgggtcccgcggaaatgcggcaaatcgccgcctggatcgatgaggtgaccaccgccgtcgccaaaggagatgaggaagcactggccgccgttgaacagcgggtggcgggcgaggtccgcgaattgacgaagaatttccccacccccgggctggaccgctga

SEQ ID NO: 10500 - protein, 427 aa, Acidothermus cellulolyticus 11B
MNSSPDPLAALTATDPTIADLIRAEERRQSEKIRLIPSENYVSKAVLEATGTVLTNKYSEGYPNRRYYEGQQFIDQIETIAIERAKQLFGVDHANVQPYSGSPANLAIYLALLSPGDTVMGMALPMGGHLTHGWPVSATGIWFRSVQYGVRRDTGRIDFDEVREVARRERPKVIFAGGTAIPRIIDFAAFAEIAREVNAVLVADIAHISGLVAGGVHPSPVGHADIISTTTHKTLRGPRGAMLMSTEQYAKALDKAVFPGLQGGPHNHTTAAIAVALLEAMQPEFRDYARNIVANAAVLAEELLARGFDLVSGGTDNHLILVDLTSKGVAGKPVARALDRAGIELNYNTVPFDPRKPFDPSGIRLGTPAVTSRGMGPAEMRQIAAWIDEVTTAVAKGDEEALAAVEQRVAGEVRELTKNFPTPGLDR

SEQ ID NO: 10501 - DNA, 1242 bp, Pelobacter propionicus DSM 2379
  CDS (1)..(1242): transl_table=11
atgtccatcctttccacactagaccctgaagttgccgacgccatcaggctggaagccgaccgccaggagtacaacctggagctgatcgcctcggagaactttgtgtcgacggcggtcctggaagcccagggttcggtgctgaccaacaagtacgccgaggggtatcccggcaaacgctactacggcggatgccacaacgtcgatattgtagaggcgcttgctattgaacgcgccaaacagctcttcgacgccgagcatgccaacgtgcagccgcattccggctcccaggcaaacatggcagtttacttttccgccctcaagccgggtgacaccatcctggggatgaatctctcccatggaggtcacctgacccacggcagcccggtgaatttctccggtcgtttcttcaacgtcgtgccctatggcgtctctccggaaacccagaccatcgattacgccgaggtggagcgcctggccctggagcataagccaaaaatgatcgtggtcggtgccagcgcctacccgcgcaccatcgacttcgccgccttccgtgccattgccgacaaggtgggcgccctggtcatggtcgacatggcccatattgccggactggtggcagccggcctgcaccccagcccgattccccacgcagaattcgtaaccaccaccacccacaagaccttgcgcggtccgcggggcggcatgatcctctgtcaggagcgcttcgccaagagcatcaactcccagatcttccccggtatccagggtgggccgctgatgcacgtcattgccgccaaggcggttgccttcaaggaagccctgcagccggaattcaagcagtaccagcagcaggtggtgaacaacgccaggaccctggccgaggaactggtgaagcgcggcttcaagctgaccagcggcggaaccgacaatcacctgatgctgctggacttctccggtacggagatcaccggcaaggccgccgaggaggcgcttgacaaggcgggcattacggcaaacaagaatacggttcccttcgagacccgttcaccctttgttacctccggcatccgcatcggcacgccggcggccacaacccatggcctgaaagaggccgagatggtgctggtggccggtttcatcgccgacgccgttgccaacatcggcagcgatgaaacgcttgcagccatcaagctgcaggtcaaccagttgatgaaaaaatttcccctctacgccaaagggtag

SEQ ID NO: 10502 - protein, 413 aa, Pelobacter propionicus DSM 2379
MSILSTLDPEVADAIRLEADRQEYNLELIASENFVSTAVLEAQGSVLTNKYAEGYPGKRYYGGCHNVDIVEALAIERAKQLFDAEHANVQPHSGSQANMAVYFSALKPGDTILGMNLSHGGHLTHGSPVNFSGRFFNVVPYGVSPETQTIDYAEVERLALEHKPKMIVVGASAYPRTIDFAAFRAIADKVGALVMVDMAHIAGLVAAGLHPSPIPHAEFVTTTTHKTLRGPRGGMILCQERFAKSINSQIFPGIQGGPLMHVIAAKAVAFKEALQPEFKQYQQQVVNNARTLAEELVKRGFKLTSGGTDNHLMLLDFSGTEITGKAAEEALDKAGITANKNTVPFETRSPFVTSGIRIGTPAATTHGLKEAEMVLVAGFIADAVANIGSDETLAAIKLQVNQLMKKFPLYAKG

SEQ ID NO: 10503 - DNA, 1254 bp, Shewanella amazonensis SB2B
  CDS (1)..(1254): transl_table=11
atgctgaagaagaccatgaatattgccgactatgatcccgagctgttcaaggcgattgaagacgaaacccttcgccaggaagagcatatcgagctgattgcctccgagaactacacttctccccgcgtgatgcaggctcagggttcacagctgaccaacaagtacgccgaaggttatcctggtaagcgttactatggtggttgtgagtacgtcgacatcgtggaaaccctggccatcgagcgcgccaaagaactcttcggtgccactttcgccaacgtacagccacactccggctctcaggccaacagcgccgtgtacatgaccctgctgcagccaggcgacactgtattgggtatgaacctggcccacggtggtcacctgacccacggctcaccggtaaacttctctggcaagctgtacaacatcattccttacggtatcgatgaaaccggcaagattgactacgacgaaatggaacgtctggccgttgagcacaagccaaagatgatgattggcggtttctccgcctattccggcatcgttgactgggcccgcatgcgtgaaatcgcagacaaaattggtgcttacctgtttgtggacatggctcacgtagctggtctcgtggcggccggtgtatatccaaacccggttccacacgctcacgtagtcacttctaccactcacaagaccctggccggcccccgcggcggtatcattctgtctgctgccaacgatgaagacctgtacaagaagctgaactcagcggtattcccaggtggtcagggtggcccattgatgcacgttatcgcaggtaaagcggtagccttcaaagaagcgctggagcctgagttcaaggtgtaccagcagcaggttgtgaccaacgccaaagccatggtggaagtattcctcgagcgcggttacaaaatcgtctccggcggcaccgacaaccacctgatgctggttgacctgattggccgcgacctgaccggtaaagaagccgacgccgctctgggcgctgccaacatcactgtgaataagaactcagtaccaaacgacccacgttctccgttcatcacctccggtatccgtatcggtactccagcgatcacccgtcgtggtttcaaagaagccgaggcccgcgagctgactcactggatctgtgatgtactggacaacgccaaagacgagagcgtgattgcccgcgtgaaaggccaggtactggaactgtgcgctcgtttccctgtttacggttaa

SEQ ID NO: 10504 - protein, 417 aa, Shewanella amazonensis SB2B
MLKKTMNIADYDPELFKAIEDETLRQEEHIELIASENYTSPRVMQAQGSQLTNKYAEGYPGKRYYGGCEYVDIVETLAIERAKELFGATFANVQPHSGSQANSAVYMTLLQPGDTVLGMNLAHGGHLTHGSPVNFSGKLYNIIPYGIDETGKIDYDEMERLAVEHKPKMMIGGFSAYSGIVDWARMREIADKIGAYLFVDMAHVAGLVAAGVYPNPVPHAHVVTSTTHKTLAGPRGGIILSAANDEDLYKKLNSAVFPGGQGGPLMHVIAGKAVAFKEALEPEFKVYQQQVVTNAKAMVEVFLERGYKIVSGGTDNHLMLVDLIGRDLTGKEADAALGAANITVNKNSVPNDPRSPFITSGIRIGTPAITRRGFKEAEARELTHWICDVLDNAKDESVIARVKGQVLELCARFPVYG

SEQ ID NO: 10505 - DNA, 1254 bp, Marinobacter aquaeolei VT8
  CDS (1)..(1254): transl_table=11
atgtttactcgtgatatgaaaatcgccggtttcgatgacgaactttggaacgctatgcaggcggaagaaaagcgccaggaagcacacatcgaactgatcgcgtctgaaaactacaccagcccgcgggtgatggaagcccaaggtagtgtgctgaccaacaagtacgctgaaggttaccccggcaagcgttactacggtggctgcgagtttgtggacatcgctgaggatctggccattgcccgcgccaaggagctgtttggtgccgcctacgccaacgtgcagccgcattccggttcacaggccaactctgcggtgttcatggcgctgctcaagcccggtgataccgttctgggtatgagtcttgctcacggtgggcacctgacccacggtgccagcgtgaacttctccggcaagatctacagcgcggttcagtatggcctgaacccggagaccggtttgatcgattatgacgaagtggaagctctggctgtcgagcacaagccgaaaatgatcatcgcgggcttctctgcttactcgcaggagctggactttgcccgtttccgtgccatcgcagacaaggtgggcgcgtatctgtttgttgacatggcccacgtggccggtctggtcgccgccggcgtctacccggatccggtacctcacgcccacgtggttgcgaccaccacgcacaaaaccctgcgcggtccacgtggcggcctgatcctggcctgtgacgacgaagatctgcagaagaagctgaactctgccgtgttcccgggcggtcagggcggccccttgatgcacgtgattgcggccaaggccgtgtgcttcaaggaagccatgagcgacgagttcaaggcctaccagcagcaggtcgtgaagaacgccgccgccatggcagaggtgttcatcgagcgcggctttgacgtggtttccggtggtaccaagaatcatctgttcctggtgagcctgatcaagcaggacattaccggtaaagacgcggatgccgcactgggcaaagcgcacattaccgtgaacaagaacgccgtgccgaacgatcctcgttcaccgttcgtaacgtccggactgcgcattggtactccggcggtgaccacacgcggcttcaaggaagccgagtgtcggaatctggcgggctggatgtgtgacatcctcgataaccttgaagacgaagcggttaatagccgtgtgcgggagcaggtggaagctgtctgcgcgcggttcccggtctacggctaa

SEQ ID NO: 10506 - protein, 417 aa, Marinobacter aquaeolei VT8
MFTRDMKIAGFDDELWNAMQAEEKRQEAHIELIASENYTSPRVMEAQGSVLTNKYAEGYPGKRYYGGCEFVDIAEDLAIARAKELFGAAYANVQPHSGSQANSAVFMALLKPGDTVLGMSLAHGGHLTHGASVNFSGKIYSAVQYGLNPETGLIDYDEVEALAVEHKPKMIIAGFSAYSQELDFARFRAIADKVGAYLFVDMAHVAGLVAAGVYPDPVPHAHVVATTTHKTLRGPRGGLILACDDEDLQKKLNSAVFPGGQGGPLMHVIAAKAVCFKEAMSDEFKAYQQQVVKNAAAMAEVFIERGFDVVSGGTKNHLFLVSLIKQDITGKDADAALGKAHITVNKNAVPNDPRSPFVTSGLRIGTPAVTTRGFKEAECRNLAGWMCDILDNLEDEAVNSRVREQVEAVCARFPVYG

SEQ ID NO: 10507 - DNA, 1254 bp, Shewanella sp. W3-18-1
  CDS (1)..(1254): transl_table=11
atgctgaaaaaagatatgaatatcgcagattatgatccggaactgtttaacgcaattcagaatgaaactctgcgtcaagaagagcatattgagctgattgcttctgaaaactacaccagtccacgcgtgatggaagcgcaaggttcacagttaaccaataagtacgctgaaggctatccaggcaagcgttactacggtggttgtgagtatgtggacgtagttgaaaccttagcgattgaacgtgctaaacaactgtttggcgcaacttacgctaacgtacaacctcattcaggttcacaggcaaacagcgctgtttacatggcattgttaaaacctggcgataccgtattgggcatgaacttagcccacggtggtcacttgacccacggttcacccgttaacttctctggcaaactgtacaacatcattccttacggtatcgacgagtctggcaaaattgactacgaagagatggaacgtattgccatagaacacaagcctaagatgatgatcggcggtttctctgcctattcaggtatcgttgactgggcaaaaatgcgtgaaatcgcagataaaataggtgcttacctatttgttgatatggcgcacgttgccggtcttattgctgcgggcgtttatccaaacccagtaccacacgcgcacgttgtgacatctacgacccacaaaaccttagcgggtcctcgtggtggcgtgatcttatctgctgctgacgatgaagacttgtacaaaaagttgaactctgcggtattcccaggcggtcaaggtggcccattgatgcacgttatcgctggtaaagcggtggcgttcaaagaagccctagagccagaatttaaagtttaccaacagcaagtggttaacaacgctaaagctatggttgaagtgttccttgagcgcggttacaaaatcgtctctggcggaaccagcaaccacttaatgctagttgacctgattggtcgtgacttaacgggtaaagaagccgatgccgccttaggtagtgctaacattaccgtgaacaaaaactcagtgccaaatgatccacgttcaccctttgtgacatcaggtgtgcgtatcggtacgccagccattacgcgccgcggctttaaagaagcggaatcgaaagagctgaccggctggatttgtgacatccttgatgatgctaacaatcctgcagtgattgagcgtgttaaaggccaagtattggcactgtgcgcacgcttccctgtttacggttaa

SEQ ID NO: 10508 - protein, 417 aa, Shewanella sp. W3-18-1
MLKKDMNIADYDPELFNAIQNETLRQEEHIELIASENYTSPRVMEAQGSQLTNKYAEGYPGKRYYGGCEYVDVVETLAIERAKQLFGATYANVQPHSGSQANSAVYMALLKPGDTVLGMNLAHGGHLTHGSPVNFSGKLYNIIPYGIDESGKIDYEEMERIAIEHKPKMMIGGFSAYSGIVDWAKMREIADKIGAYLFVDMAHVAGLIAAGVYPNPVPHAHVVTSTTHKTLAGPRGGVILSAADDEDLYKKLNSAVFPGGQGGPLMHVIAGKAVAFKEALEPEFKVYQQQVVNNAKAMVEVFLERGYKIVSGGTSNHLMLVDLIGRDLTGKEADAALGSANITVNKNSVPNDPRSPFVTSGVRIGTPAITRRGFKEAESKELTGWICDILDDANNPAVIERVKGQVLALCARFPVYG

SEQ ID NO: 10509 - DNA, 1245 bp, Acidovorax avenae subsp. citrulli AAC00-1
  CDS (1)..(1245): transl_table=11
atgtaccaacgcaatattcttgtcgaacaagccgatcccgaagtgtgggccgccatccaggccgagaacctgcgccaggagcagcacatcgaactgatcgccagcgagaactacgcctcgcccgccgtcatggcggcacagggctcgcagctcaccaacaagtacgccgaaggctatcccggcaagcgctactacggcggctgcgagaacgtggacgtggtcgagcagctggccatcgaccgcgtgaagaagctcttcggcgccgatgccgccaacgtgcagcccaattccggctcgcaggccaaccaggccgtgctgcttgccttcctcaagcccggcgacaccatcctgggcatgagcctcgccgaaggcggccacctgacccacggcatgccgctgaacatgagcggcaagtggttcaacatcgtgtcgtacggcctgaacgagaaggaagagatcgactacgacgcgctggaagccaaggcccgcgagcacaagcccaagctgatcatcgccggtgcctccgcctacagcctgcgcatcgatttcgagcgcttcgcgaagatcgccaaggaagtcggcgcgatcttctgggtggacatcgcccactatgccggcctggtggtcgcgggtgaatatcccaaccccgtgcccttcgccgacgtggtcacctccacgacgcacaagagcctgcgcggcccgcgcggcggcatcatcctcatgaaggccgaacacgagaaggcgatcaactccgccatcttcccgggcctgcagggcggcccgctggagcacgtcatcgccgccaaggccgtggccttcaaggaagcgctgacgccggaattcaaggcctaccagcagcaggtcgcgaagaacgccaaggtgttcgccgaaacgctgatcgaacgcggcctgcgcatcatcagcggccgcacggagagccacgtcatgctcgtggacctgcgcgccaagggcatcaccggcaaggcggccgaagcggccctgggccaggcccatatcaccatcaacaagaactccattccgaacgatccggaaaagccgatggtgaccagcggcatccgcgtgggcacgcccgcgatcacgacgcggggcttcaaggaagaagagacgcgcatcaccgcgaacctgctggccgacgtgctggagaacccgaacgacgaagccaacctggccgcggtgcgcgagaaggtgcacgcgctcacgagccgcttcccggtctatcgctga

SEQ ID NO: 10510 - protein, 414 aa, Acidovorax avenae subsp. citrulli AAC00-1
MYQRNILVEQADPEVWAAIQAENLRQEQHIELIASENYASPAVMAAQGSQLTNKYAEGYPGKRYYGGCENVDVVEQLAIDRVKKLFGADAANVQPNSGSQANQAVLLAFLKPGDTILGMSLAEGGHLTHGMPLNMSGKWFNIVSYGLNEKEEIDYDALEAKAREHKPKLIIAGASAYSLRIDFERFAKIAKEVGAIFWVDIAHYAGLVVAGEYPNPVPFADVVTSTTHKSLRGPRGGIILMKAEHEKAINSAIFPGLQGGPLEHVIAAKAVAFKEALTPEFKAYQQQVAKNAKVFAETLIERGLRIISGRTESHVMLVDLRAKGITGKAAEAALGQAHITINKNSIPNDPEKPMVTSGIRVGTPAITTRGFKEEETRITANLLADVLENPNDEANLAAVREKVHALTSRFPVYR

SEQ ID NO: 10511 - DNA, 1245 bp, Polaromonas naphthalenivorans CJ2
  CDS (1)..(1245): transl_table=11
atgtaccaccgcaatattctcatcgaacagaccgaccccgaaatctttgccgccatccaggctgaaaacgcccgccaagagcaccacatcgagctgatcgccagcgaaaactacgcctcgcccgccgtcatggccgcgcaaggctcgcaactcaccaacaaatacgccgaaggctaccccggccgccgctactacggcggctgcgaacatgtcgatgtggccgagcaactggccatcgaccgtgtcaagcagatctttggcgccgatgccgccaacgtccagccgcattgcggcgcatcggccaacgaagccgtgttccttgccttcctcaagcccggcgacaccatcatgggcatgagcctggccgaaggcggccacctgacgcacggcatggcgctcaacatgagcggcaaatggttcaacgtcgtttcctacggtctcaatgacaaggaagagatcgactacgaagcgatggagcgcaaggcgcacgaaaccaaacccaagctgatcattgccggcgccagcgcctactcgctggcaattgattttgaacgcttcgccagggtggccaaggatgtcggtgcgattttcatggttgatatggcgcattacgccggcctgattgccgccggcatttaccccaacccggtgccgcacgcggacatcgtgacttcgaccacgcacaagagcctgcgcggcccgcgcggcggcatcatcctgatgaaggcgcagcacgaaaaaatcatcaacagcgcaatcttccccggactgcagggcggcccgctgatgcatgtgattgccgcgaaagccatcgccttcaaggaagcgctgtcgccagaattcaagatttaccagcagcaagtcctgaagaatgcccagatcgtcgccgaaaccctgacccagcgcggcctgcgcatcgtcagcggccgcaccgaaagccacgtcatgctggtcgatttgcgcgccaagggcatcaccggcaaggaagccgaagccgtgctgggcagcgcccacatgaccatcaacaaaaatgcgattccgaacgacccggaaaagccgatggtcaccagcggcgtgcgcattggcacccccgccatgaccacgcgcggttttggcgacgaggaagcgcgcatgaccgccaacctggtggccgatgtgctggacaacccgcgcgatgccgccaacatcgaggcggttcgcgccaaggttcacgccctgaccagccgcttcccggtttacggctga

SEQ ID NO: 10512 - protein, 414 aa, Polaromonas naphthalenivorans CJ2
MYHRNILIEQTDPEIFAAIQAENARQEHHIELIASENYASPAVMAAQGSQLTNKYAEGYPGRRYYGGCEHVDVAEQLAIDRVKQIFGADAANVQPHCGASANEAVFLAFLKPGDTIMGMSLAEGGHLTHGMALNMSGKWFNVVSYGLNDKEEIDYEAMERKAHETKPKLIIAGASAYSLAIDFERFARVAKDVGAIFMVDMAHYAGLIAAGIYPNPVPHADIVTSTTHKSLRGPRGGIILMKAQHEKIINSAIFPGLQGGPLMHVIAAKAIAFKEALSPEFKIYQQQVLKNAQIVAETLTQRGLRIVSGRTESHVMLVDLRAKGITGKEAEAVLGSAHMTINKNAIPNDPEKPMVTSGVRIGTPAMTTRGFGDEEARMTANLVADVLDNPRDAANIEAVRAKVHALTSRFPVYG

SEQ ID NO: 10513 - DNA, 1317 bp, Verminephrobacter eiseniae EF01-2
  CDS (1)..(1317): transl_table=11
atggtttccttttgcgttccgccgttcgccggggcagccctgttgcaagggacaccagttcataagcctgtcatgtaccaccgccatcttctcgtcgagcaaaccgaccctgagctctttgccgccatcgaggctgaaaacgcccggcaagagcaacacatcgaactgatcgccagcgaaaactacgcctcgccggcggtcatgtgggcccagggcacacagttgaccaacaagtacgccgagggctatcccggcaagcgctactacggtggttgcgagcatgtggatgtggccgagcaactggccatcgaccgcgtcaagaaactctttggcgccgaggccgccaatgtccagccccattgcggcgcctcagccaacgaggccgtgttcctggccttcctcaagcccggcgacaccatcatgggcatgagcctggccgagggcggccatctgacgcatggcatgtcgctgaacatgtccggcaagtggttcaatgcggtctcctacggcctcgacgccgatgaggtgatcgactacgaggcgatggagaaaaaggcccatgcgacccggccccgcctgatcattgccggcgcgtcggcatacagcctgcatatcgactttgcccgctttgcccaggtggccaaggacgtgggcgcgatcttcatggtcgacatggcccattacgccggcctgattgccgccggcctgtaccccaatccggtgccccacgccgatgtggtcaccagcaccacccacaagagcctgcgcggcccccgtggcggcatcatcctgatgcgggccgcgcatgaaaaagccatccacagcgccatcttcccgggcctgcaaggcggcccgctgatgcatgtgatcgcggccaaggcggtggctttccaggaagcgctgcagcccgggttcaggctgtaccaggagcaggtgctcaaaaatgccaaggtgctggcccagacgctggccgcgcgcggcctgcgcatcgtcagcggcggcacgcaaagccacatgatgctggtggacctgcgcgccaagggcatcaccggcaaggaggccgaagccgtgctgggcgccgcccacatgaccatcaacaagaacgcgatccccaacgacccggaaaagccgatggtgaccagcggcgtgcgcattggcacccccgcaatgaccacgcgcggcttcaaggaagaacaggcacgcagcacggccgagttgatcgccgacctgctggacaagccgcgcgacgcggccaacatcgctgcggtgcgcgccaaggtcgacgcgctgacggcccgctttccggtctacggctga

SEQ ID NO: 10514 - protein, 438 aa, Verminephrobacter eiseniae EF01-2
MVSFCVPPFAGAALLQGTPVHKPVMYHRHLLVEQTDPELFAAIEAENARQEQHIELIASENYASPAVMWAQGTQLTNKYAEGYPGKRYYGGCEHVDVAEQLAIDRVKKLFGAEAANVQPHCGASANEAVFLAFLKPGDTIMGMSLAEGGHLTHGMSLNMSGKWFNAVSYGLDADEVIDYEAMEKKAHATRPRLIIAGASAYSLHIDFARFAQVAKDVGAIFMVDMAHYAGLIAAGLYPNPVPHADVVTSTTHKSLRGPRGGIILMRAAHEKAIHSAIFPGLQGGPLMHVIAAKAVAFQEALQPGFRLYQEQVLKNAKVLAQTLAARGLRIVSGGTQSHMMLVDLRAKGITGKEAEAVLGAAHMTINKNAIPNDPEKPMVTSGVRIGTPAMTTRGFKEEQARSTAELIADLLDKPRDAANIAAVRAKVDALTARFPVYG

SEQ ID NO: 10515 - DNA, 1242 bp, Campylobacter lari RM2100
  CDS (1)..(1242): transl_table=11
atgttggaaaattttgataaagaaatttttgatttaacccaaaaagagttagcaagacaatgtgatggtcttgagatgatagcaagtgaaaattttaccataccagaagttatggaggtaatgggtagcattttaacaaataaatatgcagaaggttatcctggtaaaagatattatggcggatgtgaatttgtagatgagattgaaacgattgctatagaaagatgcaaaaaactttttaattgtaattttgctaatgtgcaacctaattcaggctcgcaagcaaatcaaggtgtgtatatggcattgttaaatccaggtgatagaattttgggtatggatttaagccatggaggacacttgactcatggttctaaagtaagttcttctggaaaggtttatgaaagctttttttatggagttgagcttgatggaagaattaattatgataaagttagagagatagcaaaagagattaaaccaaaacttattgtttgtggtgctagtgcttatcctagagtgattgattttgctaaatttagagaaatagcagatgaggttggtgcgtatttgtttgctgatattgcacatattgcaggcttggttgtagcaggtgagcatcctagtccattcccttatgctcatgttgtaagttctactacacataaaactttaagaggtccaaggggtgggattattatgtgtaatgatgaagaaattgctaaaaagataaattcagcaatttttccaggcattcaaggtggtccattaatgcatgtaattgctgctaaggctgttggatttaaatataatttaagtgatgagtggaaaatttatgccaagcagatcatcaaaaatactgctactttggcacaagttttaatagatagaaaatatgatttagtcagtggtggtactgataatcatttgattttattaagctttttaaataaagaatttagtggcaaagatgcagatttagcactagaaagagcaggtattacagctaataaaaatactgttccaggtgaaactagaagtccttttgtaacgagtggtttaagacttggaacagcagctttaacagcaagaggttttaaagaagaacaaattgctattgttgcaaattatatagctgatattttagatgatatacaaaatacaaaattacaagaggaaattaaggttaaactgaaggatttagcaagtaattttattatttatgaaagggctttattttga

SEQ ID NO: 10516 - protein, 413 aa, Campylobacter lari RM2100
MLENFDKEIFDLTQKELARQCDGLEMIASENFTIPEVMEVMGSILTNKYAEGYPGKRYYGGCEFVDEIETIAIERCKKLFNCNFANVQPNSGSQANQGVYMALLNPGDRILGMDLSHGGHLTHGSKVSSSGKVYESFFYGVELDGRINYDKVREIAKEIKPKLIVCGASAYPRVIDFAKFREIADEVGAYLFADIAHIAGLVVAGEHPSPFPYAHVVSSTTHKTLRGPRGGIIMCNDEEIAKKINSAIFPGIQGGPLMHVIAAKAVGFKYNLSDEWKIYAKQIIKNTATLAQVLIDRKYDLVSGGTDNHLILLSFLNKEFSGKDADLALERAGITANKNTVPGETRSPFVTSGLRLGTAALTARGFKEEQIAIVANYIADILDDIQNTKLQEEIKVKLKDLASNFIIYERALF

SEQ ID NO: 10517 - DNA, 1254 bp, Azotobacter vinelandii
  CDS (1)..(1254): transl_table=11
atgttcagccgtgatttgaccctcgcccgctacgatgccgaactgttcgccgccatgaagcaagaagcccagcgccaggaagatcacatcgagctgatcgcctccgagaactacaccagccccgccgtgatggaggctcagggttcggtgctcaccaacaagtacgccgaaggctatccgggcaagcgctactacggcggctgcgaatacgtcgacatcgtcgagcaactggccatcgaccgcgccaagcaactgttcggcgccgactatgccaacgtccagccgcacgccggctcgcaggccaacgcggcggtctatcaggccctggtcaagccgggcgacaccgtgctgggcatgagtctggcccacggtggccacctgacccacggcgccagcgtcaacttctccggcaagatgtacaacgcagtgcagtacggcatcgacgccaacggcttcatcgactacgacgaagtggagcgtctggcgttggagcacaagccgaagatgatcgtcgccggctactcggcctactcccaggtgctggatttcgcccgtttccgcgagatcgccgacaaggtcggcgcctacctgttcgtcgacatggcccacttcgccgggctggtcgccgccggcgtctacccgaacccggtgcccttcgccgacgtggtcaccaccaccacccacaagaccctgcgcggcccgcgcggcggcctgatcctcgccaaggccaacgaagagatcgagaagaaactcaactccgccgtgttccccggcggccagggcggcccgctggaacacgtgatcgccgccaaggcggtgtgcttcaaggaagccctgcagccggacttcaaggaataccagcaacaggtggtgaagaacgccaaggccatggcccaggtgttcatcgagcgcggcttcgacgtggtgtccggcggcaccgagaaccacctgttcctggtctcgctgatcaagcaggagatcaccggcaaggacgcggacgccgccctcggccgcgccttcatcaccgtgaacaagaacagcgtgccgaacgacccgcgctcgcccttcgtcacctctggcctgcgcatcggcaccccggcggtgaccacccgcggcttcaaggaaaccgagtgtcgcgaactggccggctggatctgcgacatcctcgtcgacctgaacaacgaagcggtggtcgacggcgtgcgcgagaaggtccaggcgatctgcgccaggttcccggtgtacggcaagtaa

SEQ ID NO: 10518 - protein, 417 aa, Azotobacter vinelandii
MFSRDLTLARYDAELFAAMKQEAQRQEDHIELIASENYTSPAVMEAQGSVLTNKYAEGYPGKRYYGGCEYVDIVEQLAIDRAKQLFGADYANVQPHAGSQANAAVYQALVKPGDTVLGMSLAHGGHLTHGASVNFSGKMYNAVQYGIDANGFIDYDEVERLALEHKPKMIVAGYSAYSQVLDFARFREIADKVGAYLFVDMAHFAGLVAAGVYPNPVPFADVVTTTTHKTLRGPRGGLILAKANEEIEKKLNSAVFPGGQGGPLEHVIAAKAVCFKEALQPDFKEYQQQVVKNAKAMAQVFIERGFDVVSGGTENHLFLVSLIKQEITGKDADAALGRAFITVNKNSVPNDPRSPFVTSGLRIGTPAVTTRGFKETECRELAGWICDILVDLNNEAVVDGVREKVQAICARFPVYGK

SEQ ID NO: 10519 - DNA, 1293 bp, Xylella fastidiosa Dixon
  CDS (1)..(1293): transl_table=11
atgctgattgcatcccctgtgtttttttccggagttgccatgttcccgcgtgatgctcgtcttgatatgtacgatcccgagttggctaaggccatcgctgctgaagtgaggcgtcaggaggatcacgttgagttgattgccagtgaaaattattgcagtacgttggtgatgcaggtgcaggggagtcaactgactaataagtatgctgaagggtattctggaaagcgttactacggtggttgtgagtatgtcgatatcgctgagcaattggcgattgagcgtgccaaacaactgtttggtgccgactatgccaatgtgcagccccatagcggttcacaagccaatcaagcggtgtactttgccttgttgcagccaggcgatacgatcctcgggatgagcttggcgcatggcggccacttgactcatggcgccaatgtcaatgtgtctggcaagttgttcaatgcggttcagtacggagtgaatgctcaagggttgattgattacgaggctgttgaatcgcttgcgttagagcatcggccgaagatggttgtggcgggcttttcggcgtattcgcagaaaatcgattgggtgcgcttccgtgccattgctgatcaggtgggcgcttacttgcttgtggatatggcacatgtggctggcttggtggcggctggtgtctatccgaatccgctgccgcatgcgcatgttgtgacttcgacgacgcataagacactgcgcggcccacgtggcggcattattgtggcgcaggctccgcaggaggcgttggttaagaagttgcagtcgatagtgtttcctgggatccagggtggtccattgatgcatgtgatcgcggctaaagcggttgcttttaaggaggcgctggagcctgcgtttaaggtgtatcagcagcaggtggtgaagaatgcgaaggcgatggctgagaccctcatgttacgtggctataagattgtctctggtggtacagaaaatcatttgatgctggttgacatgatcggcagggatgtttccgggagggatgctgagggtgcactgggtcaggctcatatcaccgtcaataagaatgccgtgccagatgatccgcgctctccgttcgtaacctccgggttacgcttggggactccggcagtcacgacgcggggttaccaggaacaggattgtgtggacttagcgcactggattgctgatgtgcttgacgcgcctgcggatgcgacggtcattgccgcagtccgtgagaaggttgcggcgcagtgcaagaagtatcctgtgtatcgctga

SEQ ID NO: 10520 - protein, 430 aa, Xylella fastidiosa Dixon
MLIASPVFFSGVAMFPRDARLDMYDPELAKAIAAEVRRQEDHVELIASENYCSTLVMQVQGSQLTNKYAEGYSGKRYYGGCEYVDIAEQLAIERAKQLFGADYANVQPHSGSQANQAVYFALLQPGDTILGMSLAHGGHLTHGANVNVSGKLFNAVQYGVNAQGLIDYEAVESLALEHRPKMVVAGFSAYSQKIDWVRFRAIADQVGAYLLVDMAHVAGLVAAGVYPNPLPHAHVVTSTTHKTLRGPRGGIIVAQAPQEALVKKLQSIVFPGIQGGPLMHVIAAKAVAFKEALEPAFKVYQQQVVKNAKAMAETLMLRGYKIVSGGTENHLMLVDMIGRDVSGRDAEGALGQAHITVNKNAVPDDPRSPFVTSGLRLGTPAVTTRGYQEQDCVDLAHWIADVLDAPADATVIAAVREKVAAQCKKYPVYR

SEQ ID NO: 10521 - DNA, 1254 bp, Yersinia bercovieri ATCC 43970
  CDS (1)..(1254): transl_table=11
atgttaaagcgtgaaatgaacattgccgattatgatgcagatctatggcgtgcaatggagcaggaagtggtgcgccaggaagagcacatcgaactgattgcctctgagaactacaccagcccgcgagttatgcaggcgcaaggttctcagttgacgaacaaatatgctgaaggctacccgggcaagcgttactacggtggctgtgagtatgtcgatgttgttgagcaactggctatcgaccgtgctaaagagctgtttggtgctgattacgccaacgttcaaccgcactccggttcacaggcgaacgttgctgtttactctgcattgctgcaaccgggtgacaccgtactggggatgaatctggcgcacggcggccacttaacccacggatcaccggtaaacttctccggcaaactgtacaatatcgtgccatacggtatcgacgaatcaggccagattgattatgacgatctggcgcgtcaggcagaaaaacataaaccaaaaatgatcatcggcggcttctcggcttattccggtattgttgattgggcaaaaatgcgtgaaatcgctgacagcattgatgcatggctgtttgtggatatggctcacgtagcgggtctggttgctgcgggcgtgtacccgaacccagttcctcatgcacatatcgtgaccaccaccacgcacaaaacactggctggcccacgtggcggcttgattttggcgaaaggcggtgatgaagatctgtacaaaaaactgaactcatctgttttccctggcaaccagggcggcccattgatgcacgttatcgccggtaaagcggtcgcgctgaaagaggcgatggaacctgagttcaaaatttaccagcagcaagtggctaaaaatgccaaagcaatggtgtcggtgttcctggagcgcggctacaaagtggtttctggcggcactgaaaaccacctgttcttgctggatctggtggataaaaatatcaccggcaaagatgcagatgctgctttaggccgcgccaatattactgttaacaaaaatagcgtgcctaatgatccgaaaagtccgtttgtgacttccggtgtgcgaatcggtagcccagcgattacccgccgtggcttcaaagaggcggaatctcgcgaactggcaggctggatgtgtgatgtgttggacaacatcaacgatgaagcgaccattgagcgcgtgaagcaaaaagtcctggatatctgcgcccgtttaccggtttacgcataa

SEQ ID NO: 10522 - protein, 417 aa, Yersinia bercovieri ATCC 43970
MLKREMNIADYDADLWRAMEQEVVRQEEHIELIASENYTSPRVMQAQGSQLTNKYAEGYPGKRYYGGCEYVDVVEQLAIDRAKELFGADYANVQPHSGSQANVAVYSALLQPGDTVLGMNLAHGGHLTHGSPVNFSGKLYNIVPYGIDESGQIDYDDLARQAEKHKPKMIIGGFSAYSGIVDWAKMREIADSIDAWLFVDMAHVAGLVAAGVYPNPVPHAHIVTTTTHKTLAGPRGGLILAKGGDEDLYKKLNSSVFPGNQGGPLMHVIAGKAVALKEAMEPEFKIYQQQVAKNAKAMVSVFLERGYKVVSGGTENHLFLLDLVDKNITGKDADAALGRANITVNKNSVPNDPKSPFVTSGVRIGSPAITRRGFKEAESRELAGWMCDVLDNINDEATIERVKQKVLDICARLPVYA

SEQ ID NO: 10523 - DNA, 1920 bp, Ralstonia solanacearum UW551
  CDS (1)..(1920): transl_table=11
atgcgccggttccaggccaaccgccaggccggcattattgaccagcacgtcgacctcgcgccagccctccggcagcgtccccggcaaggccgcgacagcggcggcatcctgcacatccagcacgaacggcaacagcgcgtcgcccagctcggccttgagcgcatcgagtcgatcctggcggcggcccgccgcgatcacgcggtgcccctcccgcacgaaacgccgcgcgatggctgcgccaaagcctgccgtcgcgccggtcacgaatacgatcatggacgtgtctccgagccagaaataagcgaagtgcaagagtttaaccgagcatggcaccctgctgcgctgccatgtgcgcaaggccccgcgcggcgccttgcagcggtcatatgggtgtcgtacactcgcgggcaaccattccaccttgcgcaactggcgaatcctggggctgccgccggcagtacccggcagtgggcattgaccacgaggaagcgcaaggtctctggcgtcatgcacaacgacgcctgccgctcgcctgggcagcgaatgggaagctgggtgacttgggtccccgctgccgccggacagccggcgcagccgcccgagccgcgcgtttccccgcctcgcccgattctcccccgccgtttccgtttcgtttcagaccagacactcgccatgttcgaacgcagccgctatacgatcgaccagatcgacccagaagtcttcgccgccatccagcaggaaaaccagcgccaggaagaccacatcgagctgatcgcctccgagaactacacctcgccggccgtgatggccgcccagggctcgcagctgaccaacaagtacgccgagggctaccccggcaagcgttactacggcggttgcgaacacgtggacgtggtcgagcagctcgccatcgaccgcgtgaagcagctcttcggcgccgaagccgccaacgtgcagccgaactccggctcgcaggccaaccagggcgtgttcttcgccgtgctcaagccgggcgacaccatcatgggcatgagcctcgccgaaggcggtcacctgacccacggcatggcactcaacatgagcggcaagtggttcaacgtggtcagctacggcctgaacgcgcaggaagacatcgactacgacgcactcgaagcgctggcgcaagagaagaagcccaaactcatcatcgccggcgcatccgcattcgcgctgcgcatcgatttcgagcgcatcggcaagatcgccaaatcgatcggcgcgtacttcatggtggacatggcccactacgccggcctgatcgccgcgggcgtgtacccgaacccggtgccgcacgccgacttcgtcaccacgaccacccacaagagcctgcgcggcccgcgcggcggcgtgatcctgatgaaggccgagcacgagaaggccgtcaactcggcgatcttccccggcatccagggcggcccgctgatgcacgtgatcgcgggcaaagcggtggcattcaaggaagccctgtcgccggagttcaaggcctatcaggaacaagtcgtgaagaatgcacgcgccctggccgaaacgctgatggcccgcggccttcgcatcgtctccggccgcaccgaaagccacgtgatgctggtcgacctgcgcgccaagcagatcaccggcaaggaagccgagaaggtgctgggcaacgcgcacatcaccgtcaacaagaacgccatcccgaacgatccggagaaacccttcgtgacctcgggcatccgcctcggctcgccggccatgaccacgcgcggcttcaaggaagccgaggctgtgaaggtggcccacctgatcgccgatgtgctggataatccgcatgacgaagcgaacatcgcggccgtgcgcgccaaggtggccgaactgaccaagcagtacccggtctacgcctga

SEQ ID NO: 10524 - protein, 639 aa, Ralstonia solanacearum UW551
MRRFQANRQAGIIDQHVDLAPALRQRPRQGRDSGGILHIQHERQQRVAQLGLERIESILAAARRDHAVPLPHETPRDGCAKACRRAGHEYDHGRVSEPEISEVQEFNRAWHPAALPCAQGPARRLAAVIWVSYTRGQPFHLAQLANPGAAAGSTRQWALTTRKRKVSGVMHNDACRSPGQRMGSWVTWVPAAAGQPAQPPEPRVSPPRPILPRRFRFVSDQTLAMFERSRYTIDQIDPEVFAAIQQENQRQEDHIELIASENYTSPAVMAAQGSQLTNKYAEGYPGKRYYGGCEHVDVVEQLAIDRVKQLFGAEAANVQPNSGSQANQGVFFAVLKPGDTIMGMSLAEGGHLTHGMALNMSGKWFNVVSYGLNAQEDIDYDALEALAQEKKPKLIIAGASAFALRIDFERIGKIAKSIGAYFMVDMAHYAGLIAAGVYPNPVPHADFVTTTTHKSLRGPRGGVILMKAEHEKAVNSAIFPGIQGGPLMHVIAGKAVAFKEALSPEFKAYQEQVVKNARALAETLMARGLRIVSGRTESHVMLVDLRAKQITGKEAEKVLGNAHITVNKNAIPNDPEKPFVTSGIRLGSPAMTTRGFKEAEAVKVAHLIADVLDNPHDEANIAAVRAKVAELTKQYPVYA

SEQ ID NO: 10525 - DNA, 1278 bp, Sulfitobacter sp. NAS-14.1
  CDS (1)..(1278): transl_table=11
atgtccggttttttcaccacccccctgtccgaagccgatcccgaaatcttcgggtccattacagacgagctgggtcgccagcgtaacgagatcgaactgatcgcctccgaaaacatcgtgtctgcggctgtcatggcggcgcaggggtcggtgatgaccaacaaatacgccgaaggctacccgggccgccgctattatggcgggtgtgattttgtcgatgtggcggaaaacctggcgattgaacgcgcgtgcaaattgttcaattgcgacttcgccaacgtgcagccgaattcgggcagccaagccaaccagggcgtgttcaccgcgctgctgcaacccggtgacaccattctgggcatgagcctcgacgcgggcggccacctgacccacggggccaagccgaaccaatccggaaaatggttcaacgccatccagtacggcgtgcgcaaacaagacaaccagcttgactatgaccaggtcgaagcgctcgcgaaagagcaccagcccaagctgatcatcgccggtggttccgccattccgcgccagatcgacttcaagcggatgcgcgagattgccgatatggtcggtgcctacctgcaggtggacatggcccattttgccggtctggtcgctgcgggcgaacacccctcccccttcccccatgcgcatgtggcgacaaccaccacacataaaaccctgcgcggtccgcgcggcggcatgatcctgaccaacgacgaagcgctggcgaaaaagttcaactcggccatattccccggtattcagggtggcccgctgatgcatgtgatcgcggccaaggccgtggcctttggtgaagcgctcaagcccgagttcaagacctacatccaacaggtcatcaagaacgcccaagcactcagcgaccagctgatcaaaggcgggctcgacacgatcacccatggcaccgacacccacctgctgctggtcgacctgcgccccaaaggcgtcaaagggaacgacacggaaaaagcgctcggccgcgcccacatcacctgcaacaagaacggtgtgccgtttgaccctgaaaagcccatggtcacctccggcatccgtttgggctcgccggcggcaacaacacgcgggtttggtgaggatgaattccgtcagatcgccgactggatcatcgaggttgtcgacgggctggccgccaatggggccgatggcaacgccgaggtcgaagccaaggtcaaagccgaagtcgaagcgctctgcgcccgcttcccgatctatcccaacctctga

SEQ ID NO: 10526 - protein, 425 aa, Sulfitobacter sp. NAS-14.1
MSGFFTTPLSEADPEIFGSITDELGRQRNEIELIASENIVSAAVMAAQGSVMTNKYAEGYPGRRYYGGCDFVDVAENLAIERACKLFNCDFANVQPNSGSQANQGVFTALLQPGDTILGMSLDAGGHLTHGAKPNQSGKWFNAIQYGVRKQDNQLDYDQVEALAKEHQPKLIIAGGSAIPRQIDFKRMREIADMVGAYLQVDMAHFAGLVAAGEHPSPFPHAHVATTTTHKTLRGPRGGMILTNDEALAKKFNSAIFPGIQGGPLMHVIAAKAVAFGEALKPEFKTYIQQVIKNAQALSDQLIKGGLDTITHGTDTHLLLVDLRPKGVKGNDTEKALGRAHITCNKNGVPFDPEKPMVTSGIRLGSPAATTRGFGEDEFRQIADWIIEVVDGLAANGADGNAEVEAKVKAEVEALCARFPIYPNL

SEQ ID NO: 10527 - DNA, 1320 bp, Croceibacter atlanticus HTCC2559
  CDS (1)..(1320): transl_table=11
ttgctttttgttatttttgggctttcaattaaagatttacctcctatgcaacgtgatactgaaatattcgatttaatttctaaagaaaaagaacgccaaacaaatggtttagagcttatagcaagtgaaaattttgttagtgaccaagttatggaagctgttgggtctgtacttacaaataaatatgccgaaggttatcctggtaagcgttactatggtggttgtgaagttgtagatgttgtcgagcaaattgcaatagatagagcaaaggaactttttggagcttcttgggcaaacgtacaacctcattctggatctcaagctaacactgcagtttttgcagcttgcttaaatgcaggtgacaaatttttaggttttgatttatctcatggcggtcacctaacccatggttctccagtaaacttctctggtaaattatacaatcctgttcattatggtgtagaacgtgaaacaggacgattagattatgataatattcagaaaattgcagagcgcgaacagcctaagcttatcattgcaggagcttctgcctattcaagagagatagattataagcgttttagagaaattgcagatagcgtaggcgcacttttaatggcagatattgcgcatcctgctggtttaattgcaaagggcttactatctgatcctattcctcactgtcacgtttgtacaacaactactcataaaacattacgcggtcctcgtggtggtatgattttaatgggtgaagattttgataatccatttggattaacatttaagagtggcaaacctaaaaagatgtcttctttatttgatagcggcattttccctggaaaccaaggtggacctttagagcacgtaattgcaggaaaggctattgcttttggtgaagcgcttacagatgaatttttacattatatggttcaggttaagaagaatgctcacgttatggcagaagcttttgttgaaagaggttatgatgtgatttctggcggaacagacaaccacatgatgcttattgaccttagaaataaaaatgtaacaggtaaacttgctgaagaaactttaggtaaagcagaaattactgtaaataaaaatatggttccttttgatactgagtcgccatttgtaacatcaggaatacgtattggtactgctgcggttactactcgaggtttggttgaagatgatatgaaaactattgtagagtatattgaccgtgtaattaataatattgaaaatgatagtgagttagatgctgttaaaaatagcattcatgatatgatgaacggcaaacctttatttgttgtttaa

SEQ ID NO: 10528 - protein, 439 aa, Croceibacter atlanticus HTCC2559
MLFVIFGLSIKDLPPMQRDTEIFDLISKEKERQTNGLELIASENFVSDQVMEAVGSVLTNKYAEGYPGKRYYGGCEVVDVVEQIAIDRAKELFGASWANVQPHSGSQANTAVFAACLNAGDKFLGFDLSHGGHLTHGSPVNFSGKLYNPVHYGVERETGRLDYDNIQKIAEREQPKLIIAGASAYSREIDYKRFREIADSVGALLMADIAHPAGLIAKGLLSDPIPHCHVCTTTTHKTLRGPRGGMILMGEDFDNPFGLTFKSGKPKKMSSLFDSGIFPGNQGGPLEHVIAGKAIAFGEALTDEFLHYMVQVKKNAHVMAEAFVERGYDVISGGTDNHMMLIDLRNKNVTGKLAEETLGKAEITVNKNMVPFDTESPFVTSGIRIGTAAVTTRGLVEDDMKTIVEYIDRVINNIENDSELDAVKNSIHDMMNGKPLFVV

SEQ ID NO: 10529 - DNA, 1305 bp, Loktanella vestfoldensis SKA53
  CDS (1)..(1305): transl_table=11
atgcaccccatgaatatcacgatccgcgaccaaggctttttcaccgaaacactcgccacgcgcgaccctgtgctgcatgccgcgatgcaggccgaactgaaacgccagcgcaaagagatcgagctgatcgcgtcggaaaacatcgtctctgccgcagtgatggaagcgcaaggcggcgtgatgacgaacaaatacgccgaaggctatccgggccgccgctattacggtggctgcgaacatgtggacgtggccgagaacctggccatcgaacgcgcctgccagctgtttgattgcgcctatgtcaacgtacagcccaattcgggatcacaggcgaaccagggcgtgtttcaggcgctgctgcagcccggcgatacgatccttggcatgtcgctggatgcgggcggccacctgacccacggggccaagcccaaccagtccggcaaatggttcaacgccatccagtatggcgtgcgccgtcaagacaacctgctagattatgacgaggtcgcgcgccttgctaccgaacaccagcccaagatgatcatcgccggtggctccgccatcccccgcatcatcgatttcgccaagatgcgcgagattgccgacagcgtgggggcctatctgctggtcgatatggcgcatttcgcgggtctggtggcggcgggcctctacccctcgcccttcccgcatgcccatgtcgccacaacgacgacccacaaaacactgcgcggcccacgcggtggcatgatcctgaccaatgacgaggatctggcgaagaaattcaactcggccattttcccgggcattcagggtggcccgttgatgcatgtgatcgcaggcaaggccgtcgcatttggcgaagcattgcggcccgagttcaagacctatcaggcacaggtcatcaagaacgcgcaggcgctggccgatcagctgatgaaaggtggtctggatatcgtcaccggcggcaccgatacgcatgtgatgctggtcgatctgcgccccaagggtgtgaagggcaatgccaccgaaaaggcactgggccgcgcgcatatcacctgcaacaagaacggtatcccgtttgaccccgaaaaaccgatggtcacatctggcatccgtcttggcacgcccgcaggcacgacgcgtggtttcggcgaggccgagttccgccagatcggtgactggatcgtcgaagtcaccgaaggtctggccgccaatggcgaggatggcaatggtgacgtcgaggccaaagtccgctccgaagtcgaggcgatgtgcgaccggttcccgatctacaccaacctgtga

SEQ ID NO: 10530 - protein, 434 aa, Loktanella vestfoldensis SKA53
MHPMNITIRDQGFFTETLATRDPVLHAAMQAELKRQRKEIELIASENIVSAAVMEAQGGVMTNKYAEGYPGRRYYGGCEHVDVAENLAIERACQLFDCAYVNVQPNSGSQANQGVFQALLQPGDTILGMSLDAGGHLTHGAKPNQSGKWFNAIQYGVRRQDNLLDYDEVARLATEHQPKMIIAGGSAIPRIIDFAKMREIADSVGAYLLVDMAHFAGLVAAGLYPSPFPHAHVATTTTHKTLRGPRGGMILTNDEDLAKKFNSAIFPGIQGGPLMHVIAGKAVAFGEALRPEFKTYQAQVIKNAQALADQLMKGGLDIVTGGTDTHVMLVDLRPKGVKGNATEKALGRAHITCNKNGIPFDPEKPMVTSGIRLGTPAGTTRGFGEAEFRQIGDWIVEVTEGLAANGEDGNGDVEAKVRSEVEAMCDRFPIYTNL

SEQ ID NO: 10531 - DNA, 1293 bp, Rhodobacterales bacterium HTCC2654
  CDS (1)..(1293): transl_table=11
atgaaggacatccgctcccccggcttcttttccgagccgctttcctcccgcgaccccgagatctgggcctcgatcacaggcgagcttggtcgccagcgcgacgagatcgaactgatcgcatccgagaacatcgtgtccgccgccgtaatggaagcgcagggcagcgtgatgaccaacaaatatgccgagggctaccccggcaaacggtattacggcggctgccaatacgtcgacgtggccgaagacctggcgatcaagcgggcctgcgagttgttcggctgcgatttcgcgaacgtccagccgaattccggctctcaggccaaccagggcgcgttcaacgcgctcatcaaaccgggcgacacgatcctcggcatgaacctcgcctccggtggtcacctgacccacggcgccccgccgaaccagtcgggcaagtggttcaacgcgatccagtacggcgtgcgcaagcaggacaacctgatcgactacgacgagatcgaggcgctggcgaaagagcaccagcccaagctcatcatcgccggcggttcggccattccgcgtcagatcgacttcgccaagttccgcgagatcgccgatatggtcggcgcctacctcatggtcgacatggcccacttcgccggtctcgtggcggcgggcgagcacccctcgcccttcccctatgccgatgtcgcaaccaccacgacccacaaaaccctgcgtgggccgcgcggcgggatgatcctgaccaacgacgaagagatcgccaagaaggtgaactcggccattttccccggcattcagggcggccccctgatgcacgtgatcgccgccaaggccgtggcgttcggcgaggcgcttcagccggagttcaagacctaccagaaagccgtgcgcgccaacgcggtggcgctggccgatcaactgatgaagggcggtctggacatcgtgacgggcggcaccgacacccacgtgatgctcgtcgacctgcgccccaagggcgtcaagggcaacgcgaccgaaaaggcactgggccgcgcgcatatcacctgcaacaagaacggcattccgttcgaccccgaaaaaccgatggtgacctcgggcattcgtctcggcaccccggcgggcaccacccgcggcttcggtgaggacgagttccgccagatcgcggatctgatcgtggaagtggtcgacgggctcgccgccaatggcgaggacgggaatggcgaggtcgaagcgacggtgaaagccaaggtcgccgccctctgcgacgccttcccgatctatccgaacctgtaa

SEQ ID NO: 10532 - protein, 430 aa, Rhodobacterales bacterium HTCC2654
MKDIRSPGFFSEPLSSRDPEIWASITGELGRQRDEIELIASENIVSAAVMEAQGSVMTNKYAEGYPGKRYYGGCQYVDVAEDLAIKRACELFGCDFANVQPNSGSQANQGAFNALIKPGDTILGMNLASGGHLTHGAPPNQSGKWFNAIQYGVRKQDNLIDYDEIEALAKEHQPKLIIAGGSAIPRQIDFAKFREIADMVGAYLMVDMAHFAGLVAAGEHPSPFPYADVATTTTHKTLRGPRGGMILTNDEEIAKKVNSAIFPGIQGGPLMHVIAAKAVAFGEALQPEFKTYQKAVRANAVALADQLMKGGLDIVTGGTDTHVMLVDLRPKGVKGNATEKALGRAHITCNKNGIPFDPEKPMVTSGIRLGTPAGTTRGFGEDEFRQIADLIVEVVDGLAANGEDGNGEVEATVKAKVAALCDAFPIYPNL

SEQ ID NO: 10533 - DNA, 1341 bp, Roseovarius sp. 217
  CDS (1)..(1341): transl_table=11
atgaccaattcaccaatttttggagttgcccaaatgccccatgacggacaccagcctgttgcagatcaaggctttttcaccgaatccctgtcgtcgcgtgaccccgaactctttggcgcgatccgctctgagctgggtcggcagcgtgacgagatcgagctgatcgcgtctgagaacatcgtttctgccgccgtgatggaagcgcagggcagtgtgatgaccaacaaatacgccgaaggatatcccggcaaacgctattatggcggctgccaatatgttgatatcgcggaaaatctggcgattgagcgagcttgtgagctgtttggctgtagctttgccaacgtccagccgaattccggctctcaggccaatcagggcgtcttcacggccctcttgcagccgggtgatacgatccttggcatgagccttgatgcgggcggccacctgacccatggggcggcaccgaaccaatcgggcaaatggttcaacgccattcaatacggggtacgcaaacaggataacctgattgattacgatcaggtgcaggcattggcgaccgagcatcagcccaagctgatcatcgcgggcggctcggcgattccgcggcagatcaactttgcccggatgcgcgagattgccgatagcgtcggggcctatctgcttgtggatatggcacattttgccggtctggtggccgcgaaggagcatccgagcccgttcccgcatgcgcatgtggccacgacaacgacgcataagacgctgcgcgggccgcgcggtggcatgatcctgaccaatgacgaggggctggccaagaaattcaactcggcgattttccccggaattcagggcgggccgctgatgcatgtgatcgcggccaaggcggtggcctttggcgaggcgctgcgcccagaattcaagtcgtatattcaacaggttatccgtaatgcgcaggcgctgtcggatcagttgatcaagggcggtctggacacggtgacgcatggcaccgacacgcatgtgttgctggtggatctgcggcccaaaggcgtgaaaggcaatgacaccgaaaaggcattgggtcgggcgcatatcacctgcaacaagaatggcgtgccgtttgatccggaaaaacccactgtaaccagtgggatacggcttggctctccggcgggaacgacgcgcggctttggcgaggcggaattccggcagatcgcggattggatcatcgaggtggtcgatgggctggcggccaatggcgccgagggtaatgccgcggtcgaagccaaggtgaaggccgaggtggaggcgctgtgcaagcggttcccgatctatccgaatctctga

SEQ ID NO: 10534 - protein, 446 aa, Roseovarius sp. 217
MTNSPIFGVAQMPHDGHQPVADQGFFTESLSSRDPELFGAIRSELGRQRDEIELIASENIVSAAVMEAQGSVMTNKYAEGYPGKRYYGGCQYVDIAENLAIERACELFGCSFANVQPNSGSQANQGVFTALLQPGDTILGMSLDAGGHLTHGAAPNQSGKWFNAIQYGVRKQDNLIDYDQVQALATEHQPKLIIAGGSAIPRQINFARMREIADSVGAYLLVDMAHFAGLVAAKEHPSPFPHAHVATTTTHKTLRGPRGGMILTNDEGLAKKFNSAIFPGIQGGPLMHVIAAKAVAFGEALRPEFKSYIQQVIRNAQALSDQLIKGGLDTVTHGTDTHVLLVDLRPKGVKGNDTEKALGRAHITCNKNGVPFDPEKPTVTSGIRLGSPAGTTRGFGEAEFRQIADWIIEVVDGLAANGAEGNAAVEAKVKAEVEALCKRFPIYPNL

SEQ ID NO: 10535 - DNA, 1275 bp, Dokdonia donghaensis MED134
  CDS (1)..(1275): transl_table=11
atgcaacgcgacaccgccatttttgacctaatacaagaagaaaaagaacgccaacttaatggccttgagcttattgcttcagaaaattttgtaagtgaccaggtaatggaagctgcaggatctgtactaactaacaaatatgcagaagggtatcctggtaagcgttattatggtggttgtgaagtagtagacgaggtagagacacttgctatagagcgcgcaaaggaactttttggagccgcctatgcaaacgtacagccgcactcaggttctcaagcaaacacggccgtttttcacgcttgtttaaaaccaggagataaatttttaggttttgaccttgctcacggtggtcacttaacacacgggtcgccagtaaacttttctggtcgcttatataaccctgttttttacggagtagataaggaaacaggattacttaattacgataaaatacaagaaatagcgactgcagagcagcctaaaatgatcatagcaggtgcctctgcatactcacgtgagattgattataaacgcttccgcgaaattgcagactcagtaggcgccatccttcttgcagatgttgctcatccagcaggtcttattgcaaaaggaatcatagcagaccctataccacactgtcacgtagtaacaactactacgcacaaaacactaagagggccacgcggcggaatgatacttatgggtgaagattttgaaaacccttttggaatcacacttaaaagtggaaagaaacgtatgatgtcttctctactagatagtggtattttcccaggtaaccaaggaggaccattaatgcacgtgataggagcaaaggcaattgcctttggagaagcacttacagatgagtttttacactatatggtgcaggttaagaaaaatgcaactacactagcagatgcacttgtgcttaaaggctatgacattatatctggaggtacagataaccatatgatgcttatagacctacgcaataaagatgtaacgggtaaagctgccgaagaagcgctaggtaaggcagacattacggtaaacaagaatatggtaccatttgatgacaagtcaccatttgtaacttctggtatacgtataggtactgctgcagtaactacacgaggtcttgtagaaggtgatatgcacgagattgcaaactttatagacaaggcaatacagcaccacgataatgacgaggtgctagaaaacgttgcaaaaagtgtgaacgagatgatggggcacagaccattgtttaaagcatag

SEQ ID NO: 10536 - protein, 424 aa, Dokdonia donghaensis MED134
MQRDTAIFDLIQEEKERQLNGLELIASENFVSDQVMEAAGSVLTNKYAEGYPGKRYYGGCEVVDEVETLAIERAKELFGAAYANVQPHSGSQANTAVFHACLKPGDKFLGFDLAHGGHLTHGSPVNFSGRLYNPVFYGVDKETGLLNYDKIQEIATAEQPKMIIAGASAYSREIDYKRFREIADSVGAILLADVAHPAGLIAKGIIADPIPHCHVVTTTTHKTLRGPRGGMILMGEDFENPFGITLKSGKKRMMSSLLDSGIFPGNQGGPLMHVIGAKAIAFGEALTDEFLHYMVQVKKNATTLADALVLKGYDIISGGTDNHMMLIDLRNKDVTGKAAEEALGKADITVNKNMVPFDDKSPFVTSGIRIGTAAVTTRGLVEGDMHEIANFIDKAIQHHDNDEVLENVAKSVNEMMGHRPLFKA

SEQ ID NO: 10537 - DNA, 1275 bp, Polaribacter sp. MED152
  CDS (1)..(1275): transl_table=11
atgcaaatagacaatcaaatttttgaccttattcaagaggaaaaagaaagacaattaaatggtttagaattaatagcatctgaaaactttgtgagcgaccaagttatgcaagctcaaggatctattttaaccaataaatatgctgaaggatatccaggaaaaagatattatggaggttgtgaaattgtagatattgtagaacaaattgcaattgatagagctaaagaattatttggtgcagagtatgtaaatgttcagcctcactcaggttctcaggcaaatactgctgtttttgcagcttgtttaaagccaggagataaaattttaggttttgatttatctcatggagggcatttaactcatggttctcctgttaacttttctggtaagttatatgaaacttctttttatggtgtagacaaagaaacaggagttttagattatgataaaattcaagaaactgcaactgctgaattaccaaacttaattattgctggtgcttctgcttattctagagatattgactttaaacgttttagagaaattgctgattctgttggtgctattttaatggcagatatttctcatccagcaggtatgattgctaaaggtattttaaatgacccaatacctcattgtcatattgtaacttctactacgcataaaactttaagagggccaagaggtggaattataatggttggtaaagatttcgaaaatccgtttggagaaacgttaaaaagcggtaagcctaaaatgatgtctatgttgttaaactctgctgtttttcctggtaatcaaggaggacctttagagcatgtaattgcagccaaggcaatagcttttggagaggctttaacagatgagtttttagaataccaaattcaagtaaaagaaaatgcagcagctatggctaaagcatttgtatcaaaaggttacgatttaatttctggtggaacagataaccactgtatgttaatcgatcttagaaataaaaacatttctggtaaagatgcagaaatcgctttaggtaaagcagacattacagtgaacaaaaacatggttccttttgatgataaaagtccttttgtaacttctggtattcgtgtaggaacgcctgctattacaacacgtggtttaaaaactgaagatatggaagctgttgtaaactttatagatgaagctatacaaaatgctgataatgaagaagctttacatgaaataggagagcgtgtttctgatatgatgagttctagaagactttttgtaatgtaa

SEQ ID NO: 10538 - protein, 424 aa, Polaribacter sp. MED152
MQIDNQIFDLIQEEKERQLNGLELIASENFVSDQVMQAQGSILTNKYAEGYPGKRYYGGCEIVDIVEQIAIDRAKELFGAEYVNVQPHSGSQANTAVFAACLKPGDKILGFDLSHGGHLTHGSPVNFSGKLYETSFYGVDKETGVLDYDKIQETATAELPNLIIAGASAYSRDIDFKRFREIADSVGAILMADISHPAGMIAKGILNDPIPHCHIVTSTTHKTLRGPRGGIIMVGKDFENPFGETLKSGKPKMMSMLLNSAVFPGNQGGPLEHVIAAKAIAFGEALTDEFLEYQIQVKENAAAMAKAFVSKGYDLISGGTDNHCMLIDLRNKNISGKDAEIALGKADITVNKNMVPFDDKSPFVTSGIRVGTPAITTRGLKTEDMEAVVNFIDEAIQNADNEEALHEIGERVSDMMSSRRLFVM

SEQ ID NO: 10539 - DNA, 1296 bp, Roseobacter sp. MED193
  CDS (1)..(1296): transl_table=11
atgacagccaccacccgtgacgccggattcttcacccaagctctctctgagcgtgacccagaactctttggcgcaatgaccgacgaactgcatcgccaacgcgacgagatcgagctgattgcctcagaaaacatcgtctctgcggctgtaatggaagcccagggctctgtgctcaccaacaaatatgccgagggctacccagggcgccgctactatggcggctgccagcatgtggatgttgcggaaaacctcgctatcgaccgcgccaagcaactgttcggctgtgagtttgcaaatgtgcagcccaattccggttcccaggccaaccagggtgtatttcaggccctgatccagcccggggataccatccttggcatggacctttctgcgggcggtcacctgacccatggcgcgcgtccgaaccaatccggcaaatggtttaacgccattcactatggcgtgcgcgaagataacaatctcatcgactacgatcaggtgcaggcgctggccaccgagcatcaacccaagctgatcatcgccggtggctctgctattccgcgtcagatcgactttgccaagttccgcgaaatcgcggattccgttggtgcctacttcatggtcgacatggcccatatcgctggcctgatcgcagcaggtgaacacccctcacctttcccgcatgctcacgtggccacgaccactacccacaagaccctgcgtggcccccgtggcggcatgatcgtcactaacgacgcggatatcgccaaaaaggttaactcggccatcttccccggcattcagggtggcccactaatgcatgtgatcgcgggcaaggctgccgcctttggtgaagccctgcgccccgagttcaaagagtaccaaaagcaggtccgtgccaatgcggtcgcgctggcggatgaactgaacaaaggtgggttggccatcgtcacaggcggcaccgacacccatgtgatgcttgtcgatctacgccctaaaggcgtgaccggtaatatcgtcgacaaagccctgggccgcgcccatatcaccaccaacaagaacggcattccctttgaccccgaaaagccaatggtcacctccggtatccgccttggcacccctgcgggcacaacccgcggctttggtgaagcagaattccgcgagatcgcccaactgatcgtcgaagtggtcgatgggctggctgcgaatggtgaagagggcaatgccgaggtcgaggccgccgtacgtggcaaggtctctgccctatgcgccaaattcccgctctatccaaatctctaa

SEQ ID NO: 10540 - protein, 431 aa, Roseobacter sp. MED193
MTATTRDAGFFTQALSERDPELFGAMTDELHRQRDEIELIASENIVSAAVMEAQGSVLTNKYAEGYPGRRYYGGCQHVDVAENLAIDRAKQLFGCEFANVQPNSGSQANQGVFQALIQPGDTILGMDLSAGGHLTHGARPNQSGKWFNAIHYGVREDNNLIDYDQVQALATEHQPKLIIAGGSAIPRQIDFAKFREIADSVGAYFMVDMAHIAGLIAAGEHPSPFPHAHVATTTTHKTLRGPRGGMIVTNDADIAKKVNSAIFPGIQGGPLMHVIAGKAAAFGEALRPEFKEYQKQVRANAVALADELNKGGLAIVTGGTDTHVMLVDLRPKGVTGNIVDKALGRAHITTNKNGIPFDPEKPMVTSGIRLGTPAGTTRGFGEAEFREIAQLIVEVVDGLAANGEEGNAEVEAAVRGKVSALCAKFPLYPNL

SEQ ID NO: 10541 - DNA, 1275 bp, Leeuwenhoekiella blandensis MED217
  CDS (1)..(1275): transl_table=11
atgcaacgggatactgaaatctttgatcttattcaggaagaaaaacaacgtcaacttaatggtttagagttaattgcatcagagaacttcgtcagcgagcaagtgatggaagctgctggctctgtacttaccaataaatacgccgaagggtatcccggaaagcgctactatggaggttgtgaagtggtagatgtggtagagcaaatcgccatcgaccgcgctaaagaactttttggtgccgagtacgcaaacgtacagccacactcaggatcgcaggcaaatactgcagtttttcatgcagtgatgaagccgggcgaaacttttttaggttttgaccttgcacatggtggtcacttgacgcacggttcgcctgtaaatttttctggtcgtttatataaccctgtgttttatggggtagatcaggaaaccggtttattgaactatgataagatcgaagaacttgcggtaaaagagcagccaaaaatgatcatcgccggtgcttcagcatatagccgtgagatcgattataagcgtttccgtgagatcgcagataaagtaggagcaattttattatgcgatatggcacatcctgctggtttgatcgcaaaaggaatcataggtgatcctgtaccacattgtcatattgtaacaactacaacacataaaaccttaagaggaccacgtggaggtttgatcttgatggggaaagattttgaaaatccattcggaatcaagctgaagaacggaaacctaagaatgatgtcgtctttattagacagcggaatcttccctggaaatcaaggtggaccattagagcacatcatcgcagcaaaagcgatcgcttttggtgaagcgcttactgatgacttcttacactatatggttcaggttaagaaaaatgctgcggttatggcggctgaatttgtagctaaaggttatgatatcatttccggcggaaccgacaatcatatgatgttgatcgacttgagaaataaagatatttccggtaaagatgcagaagaagcattaggaaaagcagatattaccgttaataaaaatatggtaccgtttgatacccgttcaccctttgtaacttcaggaatgcgtattggtgttgctgccgtaacgactcgtggattggtagaagaggatatgaaaaaagtggttgagcttatcgatgctgcaattgtaaattatcaagatgatgagaagcttgaagaaattgcaggagaggtaaataacatgatgggacacagacctttattcaagcattaa

SEQ ID NO: 10542 - protein, 424 aa, Leeuwenhoekiella blandensis MED217
MQRDTEIFDLIQEEKQRQLNGLELIASENFVSEQVMEAAGSVLTNKYAEGYPGKRYYGGCEVVDVVEQIAIDRAKELFGAEYANVQPHSGSQANTAVFHAVMKPGETFLGFDLAHGGHLTHGSPVNFSGRLYNPVFYGVDQETGLLNYDKIEELAVKEQPKMIIAGASAYSREIDYKRFREIADKVGAILLCDMAHPAGLIAKGIIGDPVPHCHIVTTTTHKTLRGPRGGLILMGKDFENPFGIKLKNGNLRMMSSLLDSGIFPGNQGGPLEHIIAAKAIAFGEALTDDFLHYMVQVKKNAAVMAAEFVAKGYDIISGGTDNHMMLIDLRNKDISGKDAEEALGKADITVNKNMVPFDTRSPFVTSGMRIGVAAVTTRGLVEEDMKKVVELIDAAIVNYQDDEKLEEIAGEVNNMMGHRPLFKH

SEQ ID NO: 10543 - DNA, 1245 bp, Campylobacter jejuni subsp. jejuni 260.94
  CDS (1)..(1245): transl_table=11
atgagtttagaaatgtttgataaagaaatttttgatttaacaaacaaagagttagagcgtcaatgcgaaggtcttgaaatgatagcgagtgaaaatttcactttacctgaagtaatggaagttatgggaagtatcttgacgaacaaatacgcagaaggttatccaggtaaaagatattatggtggttgtgaatttgttgatgagattgaaactctagctattgaaagatgtaaaaaactttttaattgtaaatttgctaatgttcagcctaattcaggttctcaagctaatcaaggtgtttatgcggctttgattaatccaggtgataaaattttaggaatggatttaagtcatggtggacatttaactcatggtgcaaaagtaagttcttcgggtaaaatgtacgaaagttgtttttacggcgtagaacttgatggaagaattgattatgaaaaagtaagagaaatcgctaagaaagaaaagccaaaattaatagtttgtggagctagtgcttatgcaagagtgattgattttgctaaatttagagaaattgctgatgaaataggtgcctatctttttgctgatatagcacatattgcaggtcttgttgtggcaggcgagcatccaagtccttttccgcacgctcatgtagtaagctcaaccacacataaaactttgcgtggtccaagaggtggtattattatgacaaatgatgaagagcttgctaaaaaaattaattctgccatttttccaggtattcaaggtggtcctttgatgcatgtaattgctgcaaaagcagtaggatttaaatttaatcttagcgatgagtggaaagtttatgcaaaacaagtaagaaccaatgctcaagttttagctaatgttttaatggatagaaaatttaaacttgttagcgatggaacggataatcaccttgttttaatgagttttttagatcgtgaatttagtggaaaagatgcagatttagctcttggaaatgcaggtattactgcaaataaaaataccgttccaggagagattagaagtccttttatcacaagtggattaagacttggaactccagcgcttactgccagaggttttaaagaaaaagaaatggaaattgtgtcaaattatattgcagatattttagatgatattaataatgaaaaattacaagagaatattaaacaagaattaaaaaaacttgcaagtaattttattatttatgaaagggctatgttttga

SEQ ID NO: 10544 - protein, 414 aa, Campylobacter jejuni subsp. jejuni 260.94
MSLEMFDKEIFDLTNKELERQCEGLEMIASENFTLPEVMEVMGSILTNKYAEGYPGKRYYGGCEFVDEIETLAIERCKKLFNCKFANVQPNSGSQANQGVYAALINPGDKILGMDLSHGGHLTHGAKVSSSGKMYESCFYGVELDGRIDYEKVREIAKKEKPKLIVCGASAYARVIDFAKFREIADEIGAYLFADIAHIAGLVVAGEHPSPFPHAHVVSSTTHKTLRGPRGGIIMTNDEELAKKINSAIFPGIQGGPLMHVIAAKAVGFKFNLSDEWKVYAKQVRTNAQVLANVLMDRKFKLVSDGTDNHLVLMSFLDREFSGKDADLALGNAGITANKNTVPGEIRSPFITSGLRLGTPALTARGFKEKEMEIVSNYIADILDDINNEKLQENIKQELKKLASNFIIYERAMF

SEQ ID NO: 10545 - DNA, 1290 bp, Synechococcus sp. WH 7805
  CDS (1)..(1290): transl_table=11
atggtggatttcgcaaccgctccgatcaatgcacccctggcagactctgatcctgcgattgcccgcctgatcgatcaggagcgcgagcgtcaggaaacccatcttgagctgatcgcgtcggagaactttgcttcgagcgccgtgatggcggcccaggggtccgttttgaccaacaaatacgcggaaggccttccaaacaagcgctactacggcggttgtgagcacgtagatgccatcgaggaactggcgattgagcgggccaaggaactctttggtgcagcctgggccaacgttcagcctcacagtggtgcccaggccaatttcgctgttttcctggccctgcttcagcctggcgacacgatcatgggtctggatctgtcccatggcggtcacctgacccatggctcaccggtgaatgtgagtgggaaatggttcaacgttgtccaatacggggtcgatcaagagacccagcgattggatatggaggcgatccgtcagctggctctcgagcacaagcccaagctgatcatctgtggttactcggcctaccctcgcacgattgattttgcggcttttcgttcgattgccgatgaagttggcgcttacttgcttgccgacatggctcatatcgctggactcgtggcagcaggcgtccatcccagccctgttccgtactgcgatgtggtcaccacaacaacgcataagacgctgcgcggtcctcgcggtggtctgattctctgccgggatgcagatttcgccaagaagttcgacaaggccgtgttccctggcacgcaaggcgggcctctcgaacatgtgatcgcggcaaaggccgtggccttcggtgaggctctccggccatcattcaaggtctacagccagcaggttgtggctaacgctcaagcgttggccgaccgattgatggcccgcggcattgacgtggtgagtggggggactgataaccatgtggtgctgcttgatctgcgcagcatcggtatgaccggcaaggtggctgatctcctggtgagcgatgtgcacatcacggccaacaagaacacggttccttttgatccagaatcccccttcgtgaccagcgggctgcgcttagggaccgctgctctcaccacccgaggctttgataccgatgcatttgctgaggtggcggaggtgattgccgatcgcctcttgaatcccgcagacgacgcggttcagtcgcgctgtcttgagcgagtggcgaatctctgccgtcgcttccccctttacgcacaggcgacggagccggcgcttgtctga

SEQ ID NO: 10546 - protein, 429 aa, Synechococcus sp. WH 7805
MVDFATAPINAPLADSDPAIARLIDQERERQETHLELIASENFASSAVMAAQGSVLTNKYAEGLPNKRYYGGCEHVDAIEELAIERAKELFGAAWANVQPHSGAQANFAVFLALLQPGDTIMGLDLSHGGHLTHGSPVNVSGKWFNVVQYGVDQETQRLDMEAIRQLALEHKPKLIICGYSAYPRTIDFAAFRSIADEVGAYLLADMAHIAGLVAAGVHPSPVPYCDVVTTTTHKTLRGPRGGLILCRDADFAKKFDKAVFPGTQGGPLEHVIAAKAVAFGEALRPSFKVYSQQVVANAQALADRLMARGIDVVSGGTDNHVVLLDLRSIGMTGKVADLLVSDVHITANKNTVPFDPESPFVTSGLRLGTAALTTRGFDTDAFAEVAEVIADRLLNPADDAVQSRCLERVANLCRRFPLYAQATEPALV

SEQ ID NO: 10547 - DNA, 1263 bp, Nitrococcus mobilis Nb-231
  CDS (1)..(1263): transl_table=11
atgttctccagtgagatgaccattgccggacttgatcctgaactggccgaggcgatcgagcgggagaaacatcgccaggaggagcacatcgagctcatcgcatccgagaactacgccagcccgcgggtgctcgaggcccaaggcagtgttctgaccaacaaatacgcggaaggctacccggccaaacgctactatggcggctgcgagtacgtggatattgctgagcaactggccatcgaccgggctaagcgactgttcggcgcggcctacgccaacgtgcaaccccactcgggctcccaggccaatgccgccgtctacctggcgctggccaagccgggtgacaccatcttgggcatgagcctcgatcacggcggccacctgacccatggcgccaagccgaatttctcgggcaaactgttcaacgccgtgcagtacggcatcgatgcgcgaaccggcgagatcgactacgcgcaagtcgagcgccttgccctcgagcaccggcccaagctggtaatcgccggtttttcagcctattcacgagtgattgattggcagcgttttcgcgaaatagccgacgagatcggcgcctacctgatcgtcgacatggctcacgtagcgggtctcgtggccgccggcctttatcccaacccggctcagatcgccgatgtcaccaccacgacgactcacaaaaccttgcgtggcccacgcggcggcctgattctggcacgcgctaacgatcgggtcgagaaggccttacaatccctggtctttccaggcactcagggtggaccgctgatgcatgtcatcgccgccaaagcggtcgcgctgaaggaagcgttggaaccggccttcaccgattatcaacagcaggttctggccaactcccgagcgatggcggccaccgttatggaccggggctttcaggtggtcagcggcggcaccgataatcacctgttcttgatcaacctcatcaagcagggcttgaccggcaaggaggccgacgccgttttgggtcgagcgaatatcacggtgaacaaaaataccgtaccgaacgacccgcaatcgccatttgttaccagcggcttgcgtatcggctcaccggccgttaccacccgcggttttggtgaggcggaagtccggcaattggcggggtggatatgcgacatcctggatgacatccataatgagcaaattatcgcccgggtccgcagtcaagtactggagatctgccgacgcttcccggtctaccaggcaagtgcttga

SEQ ID NO: 10548 - protein, 420 aa, Nitrococcus mobilis Nb-231
MFSSEMTIAGLDPELAEAIEREKHRQEEHIELIASENYASPRVLEAQGSVLTNKYAEGYPAKRYYGGCEYVDIAEQLAIDRAKRLFGAAYANVQPHSGSQANAAVYLALAKPGDTILGMSLDHGGHLTHGAKPNFSGKLFNAVQYGIDARTGEIDYAQVERLALEHRPKLVIAGFSAYSRVIDWQRFREIADEIGAYLIVDMAHVAGLVAAGLYPNPAQIADVTTTTTHKTLRGPRGGLILARANDRVEKALQSLVFPGTQGGPLMHVIAAKAVALKEALEPAFTDYQQQVLANSRAMAATVMDRGFQVVSGGTDNHLFLINLIKQGLTGKEADAVLGRANITVNKNTVPNDPQSPFVTSGLRIGSPAVTTRGFGEAEVRQLAGWICDILDDIHNEQIIARVRSQVLEICRRFPVYQASA

SEQ ID NO: 10549 - DNA, 1299 bp, Oceanicola granulosus HTCC2516
  CDS (1)..(1299): transl_table=11
atgagcgcgcccaccagagacgacgacggcttcttcaccgagaaactcgcgggccgcgaccccgagatctggggcgcgatccagaaggagctgggccgccagcgcaacgagatcgagctgatcgcgtcggaaaacatcgtctccgccgccgtgctcgaggcgcagggctcggtgatgaccaacaagtacgccgagggctatccgggccggcgctactacggcggctgccagtatgtcgacatcgccgagaacctggccatcgagcgcgcctgcgaactcttcgagtgcgagttcgccaacgtgcagcccaactccggcagccaggccaatcagggcgtctacaccgccctgctccagcccggcgacacgatcctcggcatgagcctcgacgccggcggccacctgacccacggcgcgcggcccaaccagtcgggcaagtggttcaacgcggtgcagtacggcgtgcgcaagcaggacagccagatcgactacgaccagatccagcagctcgccaccgagcaccggcccaagatgctgatcgccggcggctcggccatcccccgcatcatcgacttcgcccgcatgcgcgagatcgccgacagcgtcggcgcgctgctgctcgtggacatggcgcacttcgccggcctcgtggcggcgggcatctatccctcgcccttcccgcacgcccacgtcgccaccaccaccacacacaagaccttgcgcgggccccgcggcgggatgatcctgaccaacgacgccgacatctcgaagaaggtgaactccgccatcttccccggcatccagggcggcccgctgatgcacgtgatcgcgggcaaggccgtggccttcggcgaggcgctgcgccccgagttcaagacctatcaggaacaggtcgtcgccaacgcccgcgcgctggccgaccagctgatgaagggcgggctcgacatcgtcaccggcggcaccgacagccacctgatgctcgtcgacctgcggcccaaggcggtcaagggcaacgccaccgagaaggcgctcaaccgcgcccacatcacgaccaacaagaacggcatccccttcgatcccgaaaagcccaccgtcacctccggcatccgcctcggcacgccggcgggcaccacgcgcggtttcggcgaggaggagttccgccaggtcggcgactggatcgtcgaggtggtcgacgggctcgcggccaacggcgaggacagcaacggcgaggtcgaggccaaggtgcgggccgaggtggaggcgctgtgcgagcgcttcccgctctacccgaccctgtga

SEQ ID NO: 10550 - protein, 432 aa, Oceanicola granulosus HTCC2516
MSAPTRDDDGFFTEKLAGRDPEIWGAIQKELGRQRNEIELIASENIVSAAVLEAQGSVMTNKYAEGYPGRRYYGGCQYVDIAENLAIERACELFECEFANVQPNSGSQANQGVYTALLQPGDTILGMSLDAGGHLTHGARPNQSGKWFNAVQYGVRKQDSQIDYDQIQQLATEHRPKMLIAGGSAIPRIIDFARMREIADSVGALLLVDMAHFAGLVAAGIYPSPFPHAHVATTTTHKTLRGPRGGMILTNDADISKKVNSAIFPGIQGGPLMHVIAGKAVAFGEALRPEFKTYQEQVVANARALADQLMKGGLDIVTGGTDSHLMLVDLRPKAVKGNATEKALNRAHITTNKNGIPFDPEKPTVTSGIRLGTPAGTTRGFGEEEFRQVGDWIVEVVDGLAANGEDSNGEVEAKVRAEVEALCERFPLYPTL

SEQ ID NO: 10551 - DNA, 1254 bp, Pseudomonas aeruginosa PACS2
  CDS (1)..(1254): transl_table=11
atgttcagccgtgatttgaccctcgcccgctacgatgccgaactctttgccgcgatggagcaggaagcccagcgccaggaagagcacatcgagctgatcgcctccgagaactacaccagcccggcggtgatggaagcccagggttcggtgctgaccaacaagtacgccgaaggttatccgcacaagcgctactacggcggctgcgagtacgtcgatatcgtcgagcaactggccatcgaccgcgccaagcaactgttcggcgccgattacgccaacgtccagccgcacgccggctcccaggccaacgccgcggtctacctggccctgctgtcggccggcgacaccatcctcggcatgagcctggcccatggcggccacctgacccacggcgccagcgtctcctcctccggcaagctgtacaacgccgtgcagtacggcatcgacgccaatggcctgatcgactacgacgaagtcgagcgcctggccgtggagcacaagccgaagatgatcgtcgccggcttctccgcctattcccaggtcctcgatttcgcccgcttccgcgccatcgccgacaaggtcggcgcctacctgttcgtcgacatggcccacgtcgccggcctggtcgccgctggcgtctacccgaacccggtgccgttcgccgacgtggtcaccaccaccacccacaagaccctgcgcggtccgcgcggtggcctgatcctggcgcgcgccaacgaggagatcgagaagaagctcaactccgcagtattccccggcgcccagggcggtccgctggagcacgtgatcgcggccaaggcggtgtgcttcaaggaagccctgcagccggagttcaagacctaccagcagcaggtcctgaagaacgcccagagcatggcccaggtcttcctcgaccgcggtttcgacgtggtttccggcggcacccagaaccacctgttcctgctctccctgatcaagcaggacatcaccggcaaagacgccgacgccgccctcggccgcgcgttcatcaccgtgaacaagaactcggtcccgaacgacccgcgctcgccgttcgtcacctccggcctgcgcatcggtaccccggccgtgaccacccgcggcttcaaggaagccgagtgccgcgagctggccggctggatctgcgacatcctcgagaacatgggcgacgagtccgtggtcgacggcgtacgcgagaaggtcaaggcgatctgcgccaagttcccggtctacggcaactaa

SEQ ID NO: 10552 - protein, 417 aa, Pseudomonas aeruginosa PACS2
MFSRDLTLARYDAELFAAMEQEAQRQEEHIELIASENYTSPAVMEAQGSVLTNKYAEGYPHKRYYGGCEYVDIVEQLAIDRAKQLFGADYANVQPHAGSQANAAVYLALLSAGDTILGMSLAHGGHLTHGASVSSSGKLYNAVQYGIDANGLIDYDEVERLAVEHKPKMIVAGFSAYSQVLDFARFRAIADKVGAYLFVDMAHVAGLVAAGVYPNPVPFADVVTTTTHKTLRGPRGGLILARANEEIEKKLNSAVFPGAQGGPLEHVIAAKAVCFKEALQPEFKTYQQQVLKNAQSMAQVFLDRGFDVVSGGTQNHLFLLSLIKQDITGKDADAALGRAFITVNKNSVPNDPRSPFVTSGLRIGTPAVTTRGFKEAECRELAGWICDILENMGDESVVDGVREKVKAICAKFPVYGN

SEQ ID NO: 10553 - DNA, 1314 bp, Chlorobium ferrooxidans DSM 13031
  CDS (1)..(1314): transl_table=11
atggataccgacatccttcaactgcaggatagagaggtctttgaggctatagccaatgagacgacccggcagactgaaacacttgaactcattgcttcggaaaattttaccagccgtgccgtcatgcaggcatgcggctcggtgatgaccaataaatatgccgagggctatcccggcaagcgctactatggcggatgcgaatttgttgatgttgccgagaatctcgcccgcgaccgggctaaaaagctgtttaaatgcgactatgtcaatgtacagccgcattccggttcgagcgccaacatggcggttcttttttcggtgctgaagcccggcgacaccatcatggggctcgacctctcgcatgggggccatctgactcacggcagctcggtcaacttttccggccagatgtatgatgcgcactcctatggtgtggatcgcgagagcggcttgattgatatgaacagggttgaggagcttgccctcaaggtcagacctaaactgattattgccggagccagcgcctattcgcaggggtttgatctgaaggcgttcagggcgattgccgacaaggtcggagcttttctgatggccgatatcgctcatcctgccggactgattgccgcaggtcttctgggcgatcccatgccgcactgtcattttgtgaccaccacgacgcataaaacccttcgcggacccagaggcggtatgatcatgatgggcagtgatttcgagaatcccatgggaattaccatcaaaaccaaaaccggctcgcgcgtgaaaatgatgtccgaagtgatggatgcagaggttatgcccggtatccagggcggcccgcttatgcatgtcattgcaggcaaggctgtagcgttcggtgaggcactgaagccggagttcagggagtacgccattcaggtcagaaagaatgctgctgcgatggcggagaagttcacctcactcggttataatattgtcagcggcggaaccaagaaccacctcatgctgcttgatttgcgcaacaagaacgttaccggcaaggttgccgagaacctgctgcacgatgccggtgttacggtcaacaagaacatggttccttttgatgacaagtcaccctttgtcaccagcggcatccgtatcggtacaccggccatgacgaccagaggcatggttgaagcggacagtatcgctgtcgctgaactgattgaccgggttattactgcggctgaaaagcctgatgtggcgaaggtctgtcagggtgtcagagaggagatcaaggcactctgccttcgcaacccgcttgtgggctatgtgtaa

SEQ ID NO: 10554 - protein, 437 aa, Chlorobium ferrooxidans DSM 13031
MDTDILQLQDREVFEAIANETTRQTETLELIASENFTSRAVMQACGSVMTNKYAEGYPGKRYYGGCEFVDVAENLARDRAKKLFKCDYVNVQPHSGSSANMAVLFSVLKPGDTIMGLDLSHGGHLTHGSSVNFSGQMYDAHSYGVDRESGLIDMNRVEELALKVRPKLIIAGASAYSQGFDLKAFRAIADKVGAFLMADIAHPAGLIAAGLLGDPMPHCHFVTTTTHKTLRGPRGGMIMMGSDFENPMGITIKTKTGSRVKMMSEVMDAEVMPGIQGGPLMHVIAGKAVAFGEALKPEFREYAIQVRKNAAAMAEKFTSLGYNIVSGGTKNHLMLLDLRNKNVTGKVAENLLHDAGVTVNKNMVPFDDKSPFVTSGIRIGTPAMTTRGMVEADSIAVAELIDRVITAAEKPDVAKVCQGVREEIKALCLRNPLVGYV

SEQ ID NO: 10555 - DNA, 1248 bp, Geobacter sp. FRC-32
  CDS (1)..(1248): transl_table=11
atgtccatactggagaattttgatcccgccgtagcacatgccatacgagttgaaactgagcggcaggagtttaacctggaactgatcgcctcggaaaacttcgtttcggaagcggtcatggaggctcagggttcggtcctgaccaataaatatgccgaaggatatcccggcaagcgctactatggcggctgccataatgtggacatagtggaaaatctggccatcgatcgggcaaaggagctgttcggcgccgagcatgccaacgtgcagcctcactccggttcacaggccaacatggctgtttactttacggtacttaagccgggggataccgtgctcggcatgaatctggcccatggcggccacctgacccacggcagtccggtcaacttttcggggaaatttttcaatattgtcccctatggggtgaccaaggaaagccagaccattgactacgccgaggttgaaaggctggctgttgagcataaaccgaaaatgatcgttgtcggtgccagcgcctatccgcgtaccatcgattttgcagctttccgcaagatcgccgacaaggtgggagccgtggtcatggtggatatggcccatatcgcagggcttgtcgctgcaggacttcatccgagtccggtgccccatgccgaatttgtcaccactacaacccacaagactctgcgcgggccccgtggcggtatgattctctgccgtgaggaatttgccaaggcactcaattccaacatcttcccggggatccaaggcggtcccctgatgcatgtcattgccgccaaggcggtggcattcaaggaggcgctgtctcccgagttcaagcagtatcagcagcagatagtcaataatgccaaggcactggcggtagcgctgatgaaaaatggattcaagctcacctccggcggtaccgacaatcacctgatgctggttgatctgtcggagacaccgctgactggcaaggtggccgaggaagccctggacaaggccggaattaccgtcaacaaaaacggcatccccttcgatacccgttctccttttattacctccggtatcaggatcggtacccctgctgccactacccatggcctgaaggaaccggagatggcgcaggtggcaggttttatcgccgatgcactggccaatgttgacaatgatgctaagctggctgaaataaagggacgggtaaataccatgatgaagcagtttcccctgtattccagcagactcgcctga

SEQ ID NO: 10556 - protein, 415 aa, Geobacter sp. FRC-32
MSILENFDPAVAHAIRVETERQEFNLELIASENFVSEAVMEAQGSVLTNKYAEGYPGKRYYGGCHNVDIVENLAIDRAKELFGAEHANVQPHSGSQANMAVYFTVLKPGDTVLGMNLAHGGHLTHGSPVNFSGKFFNIVPYGVTKESQTIDYAEVERLAVEHKPKMIVVGASAYPRTIDFAAFRKIADKVGAVVMVDMAHIAGLVAAGLHPSPVPHAEFVTTTTHKTLRGPRGGMILCREEFAKALNSNIFPGIQGGPLMHVIAAKAVAFKEALSPEFKQYQQQIVNNAKALAVALMKNGFKLTSGGTDNHLMLVDLSETPLTGKVAEEALDKAGITVNKNGIPFDTRSPFITSGIRIGTPAATTHGLKEPEMAQVAGFIADALANVDNDAKLAEIKGRVNTMMKQFPLYSSRLA

SEQ ID NO: 10557 - DNA, 1257 bp, Chloroflexus aggregans DSM 9485
  CDS (1)..(1257): transl_table=11
atgcttgaacatctgcgcgcaactgacccgatcattgccgatttgatcgagcgggaagcgcaacgccaacggcaaggacttgagctgatcgccagcgagaactatacgagtctcgcggtgatggaggcccaggggtcggtactgacgaataagtacgccgaagggttgcctggtcggcgttactacggtggctgtgagtttgtcgatgcaattgagcaattggccatcgaccgcgcgtgccagttgttcggtacgtcgcacgccaatgttcagccgcatagcggtgcgcaagccaatattgcggtgtttaccgctctcttgcagcccggagataccattcttggtatgcggcttgatcacggtggtcacctgacccacggcagcccggtgaacttttcggggaagtggtataacgttcatttctacggtgttgatccccaaacgggtcagatcgattacgacgatttggcggcaaaagcgcgtgctatccggcctaaactgattacgtcaggggcgagtgcttatccgcgcttgatcgattttgcccgtatgcgccagatcgccgatgaggttggtgctttgctgatggccgacattgcccatattgccgggttggtcgctaccggcgagcatccatcgccggtcggtcatgcccacattattacgactaccacgcacaagacgctgcgtgggccacgtggtggcttgatcctgatgggtgaagaatttgccaaacagatcaactcgagcgtctttccaggcacgcagggtggccccctgatgcacgtcattgccggtaaagcagtagcgtttggcgaggccctccgccctgagtttaagcagtacgcggctcagattcggcgtaatgccaaagcgttggccgaggggctgcacgctcaaggtttaacgctggtgagtggtgggaccgataatcacctgatgttggttgacctgcggagtaccggcctcaccggtgcgcaggcacagcgtgcgcttgataaagctgcgatcaccgtcaataagaatgcgatccccgatgacccccagccaccgatgaagacgagcgggattcggattgggacgccggcggtcacaacacgagggatgcgtgagcgtgagatggcgcaaatcgcagcgtggattggggaagtcctgatgtatcccgatgatgaggtacgtttggcacggatcgcagccgaggtggccgagatgtgtcgccattttccggtaccggcagatatggtgcaagtacggtaa

SEQ ID NO: 10558 - protein, 418 aa, Chloroflexus aggregans DSM 9485
MLEHLRATDPIIADLIEREAQRQRQGLELIASENYTSLAVMEAQGSVLTNKYAEGLPGRRYYGGCEFVDAIEQLAIDRACQLFGTSHANVQPHSGAQANIAVFTALLQPGDTILGMRLDHGGHLTHGSPVNFSGKWYNVHFYGVDPQTGQIDYDDLAAKARAIRPKLITSGASAYPRLIDFARMRQIADEVGALLMADIAHIAGLVATGEHPSPVGHAHIITTTTHKTLRGPRGGLILMGEEFAKQINSSVFPGTQGGPLMHVIAGKAVAFGEALRPEFKQYAAQIRRNAKALAEGLHAQGLTLVSGGTDNHLMLVDLRSTGLTGAQAQRALDKAAITVNKNAIPDDPQPPMKTSGIRIGTPAVTTRGMREREMAQIAAWIGEVLMYPDDEVRLARIAAEVAEMCRHFPVPADMVQVR

SEQ ID NO: 10559 - DNA, 1239 bp, Clostridium cellulolyticum H10
  CDS (1)..(1239): transl_table=11
atgtacaatattgatacgataaagaagattgattctcaattagcagaagctattgagttagaagtcaacagacagagaaataaaatagaattaattgcttcagagaattttgtaagtgatgctgttatagaggcacttggaacacccttaacaaataaatacgcggaaggttatcctggaaaaagatattatggcggatgcgaatatgtagatatagttgaacaacttgctattgacagagcaaagcagatttttggtgcagaacatgcaaatgttcagcctcattctggagcacaggcaaatacagctgtttactttgcttttctaaatcccggagatacaattctgggaatgaaccttgcacacgggggacatttaagccatggcagtcccgttaacatatccggtaagtactataaggtagtaccatacggtgtaagagaggacaactgctacattgattatgatgagttgagaaaaaccgctaaggaaaactcacccaaaataattgtagcaggagcaagtgcatatccaagaatactagattttaaggcattcagggagattgctgatgaagttggagcaattctaatggttgatatggctcacatagcaggtcttgttgctgccggagtgcacccaagtcctgttccatatgctgacgttgtaacaactacaactcacaagacattaagaggcccaagaggcggtatgattctctgcaagcaggaatatgccaagaaaatcgacagtgctgtgttccctgggaatcagggtggtccattgatgcacgttattgccgctaaagcagtaagctttaaggaagctcttactgatgatttcaaaatatatcagcaaaacattgtaaaaaatgcaaaagctttggcttctgctcttatggaaaagggctttaagctagtttcagatggcaccgacaaccaccttatgcttattaacctgacaaatatgaatattacgggtaaggaagcacagcataagttagatgaggtctgcatcacatgtaacaaaaacggtattccttttgatactcagagtccatttattacaagcggtataagacttggtactccggctgtaacaagcagaggaatgaatgaggaagatatgaaagagattgcagacttaattcatctcacaatttcagattttgaaaattcaaggacgaatataataagaagagttgaggctctttgtaataaatatcctttatatgaataa

SEQ ID NO: 10560 - protein, 412 aa, Clostridium cellulolyticum H10
MYNIDTIKKIDSQLAEAIELEVNRQRNKIELIASENFVSDAVIEALGTPLTNKYAEGYPGKRYYGGCEYVDIVEQLAIDRAKQIFGAEHANVQPHSGAQANTAVYFAFLNPGDTILGMNLAHGGHLSHGSPVNISGKYYKVVPYGVREDNCYIDYDELRKTAKENSPKIIVAGASAYPRILDFKAFREIADEVGAILMVDMAHIAGLVAAGVHPSPVPYADVVTTTTHKTLRGPRGGMILCKQEYAKKIDSAVFPGNQGGPLMHVIAAKAVSFKEALTDDFKIYQQNIVKNAKALASALMEKGFKLVSDGTDNHLMLINLTNMNITGKEAQHKLDEVCITCNKNGIPFDTQSPFITSGIRLGTPAVTSRGMNEEDMKEIADLIHLTISDFENSRTNIIRRVEALCNKYPLYE

SEQ ID NO: 10561 - DNA, 1254 bp, Shewanella putrefaciens 200
  CDS (1)..(1254): transl_table=11
atgctgaaaaaagatatgaatatcgcagattatgatccggaactgtttaacgcaattcagaacgaaactctgcgtcaagaagagcatattgagctgattgcttctgaaaactacaccagtccacgcgtgatggaagcgcaaggttcacagttaaccaataagtacgctgaaggctatccaggcaagcgttactacggtggttgtgagtatgtggacgtagttgaaaccttagcgattgaacgtgctaaacaattgtttggcgcaacctacgctaacgtacaacctcattcaggttctcaagcaaacagcgccgtttacatggcattgttaaaacctggcgataccgtactgggcatgaacttagcccacggtggtcacttgacccacggttcaccggttaacttctctggcaaactgtacaacatcattccttacggtatcgatgagtctggcaaaatcgactacgacgagatggaacgtattgccatagaacataagcctaagatgatgatcggcggtttctctgcctattcaggtatcgttgattgggcaaaaatgcgtgaaatcgcagataaaatcggtgcttatttatttgtagacatggcacacgttgccggtcttatcgccgcgggcgtttatccaaacccagtaccacacgcgcacgttgtgacgtcaacgacccataaaaccttagccggtcctcgtggtggtgtgatcctatctgctgccgatgatgaagagctatataaaaagctcaactctgctgtattccctggtggtcaaggtggtccattgatgcacgttatcgccggtaaagcggtggcgttcaaagaagccctcgagccagaatttaaagtgtaccaacagcaagtggttaataacgctaaagctatggttgaagtattccttgagcgcggttacaaaatcgtctctggcggaaccagcaaccacttaatgctagttgacctgattggtcgtgacttaacgggtaaagaagccgatgcagccttaggtagcgccaacattaccgtgaacaaaaattcagtgccaaatgatcctcgttcaccctttgtgacatcaggtgtgcgtatcggtacgccagccattacacgccgcggctttaaagaagcggaagcaaaacaattaactggctggatctgtgacattctcgatgatgctcacaaccctgcagtgattgagcgagtgaagggccaagtattggcactgtgcgcacgtttccctgtttacggttaa

SEQ ID NO: 10562 - protein, 417 aa, Shewanella putrefaciens 200
MLKKDMNIADYDPELFNAIQNETLRQEEHIELIASENYTSPRVMEAQGSQLTNKYAEGYPGKRYYGGCEYVDVVETLAIERAKQLFGATYANVQPHSGSQANSAVYMALLKPGDTVLGMNLAHGGHLTHGSPVNFSGKLYNIIPYGIDESGKIDYDEMERIAIEHKPKMMIGGFSAYSGIVDWAKMREIADKIGAYLFVDMAHVAGLIAAGVYPNPVPHAHVVTSTTHKTLAGPRGGVILSAADDEELYKKLNSAVFPGGQGGPLMHVIAGKAVAFKEALEPEFKVYQQQVVNNAKAMVEVFLERGYKIVSGGTSNHLMLVDLIGRDLTGKEADAALGSANITVNKNSVPNDPRSPFVTSGVRIGTPAITRRGFKEAEAKQLTGWICDILDDAHNPAVIERVKGQVLALCARFPVYG

SEQ ID NO: 10563 - DNA, 1260 bp, Coxiella burnetii 'MSU Goat Q177'
  CDS (1)..(1260): transl_table=11
atgtatgagcctacgttgaccgtagagagtttcgattccgaattggcgggagcgattcgggacgaaaggcgtcggcaggagcaccatgttgagttgattgcctcggagaactatgtcagtccgcgggtgttggaacttcaggggtcggtgttgaccaataagtacgctgaagggtatcctggcaggcgttattacggtggttgtgaatttgtcgatattgccgagcaattggcgattgatcgagcgaaggaactgtttggggcggattatgcgaacgttcagccgcattcgggttcgcaagccaatgcagaagcctatatggcgctaatgaatccaggcgataccttgcttgccatggatttgtcgcatggagggcacttgacccacggctctcctgtcagtttttcaggtaagttctataaagccgtgcattacggtttaaatgcgcatggtgatattgattacgagcaagcggcccaactagcgcaagagcataaaccgaaagttatcctagcgggattttctgctttttcgggtatcgtcgattggcagcgttttcgcgaaatcgcggacagtgttaacgcctactttatgactgacattgcacatgtggctggtttagtggccgccggcgtctatccttcgccggttcaaattgctgatgttacgacgaccacgacccataaaacattacgaggccctcgtgcgggtttaattttagcaaaagccaaccccgaactagaaaagcgtttaaattccgccgtatttccaggttctcagggcggacctttgatgcacattattgcggccaaagcagttgccttcaaagaagcgatgcaaccggaatttaaaacttatgcgcaacagattttaaaaaatgctaaggcaatggcggaggtgatgaaggagcgcggttatacgattgtctcgggtggcacgcaaaatcacctatttttagtgagcttgttagataaaaacatatcgggcaaagaagccgaagcggctttaggacgagctaatattacagttaacaaaaataccgttcccggtgaaacccgctcgccttttgtgactagtggccttcgcattggcactcccgccattaccacccgagggtttaaagaaaaagaagcttctcaattggcgcattgggtttgtgatattttagatgatattcataacgaaaaagtcatcgccgatgtcaaacaaaaagccgatgaattgtgtgggaaatttccggtgtatcaggaactcgactga

SEQ ID NO: 10564 - protein, 419 aa, Coxiella burnetii 'MSU Goat Q177'
MYEPTLTVESFDSELAGAIRDERRRQEHHVELIASENYVSPRVLELQGSVLTNKYAEGYPGRRYYGGCEFVDIAEQLAIDRAKELFGADYANVQPHSGSQANAEAYMALMNPGDTLLAMDLSHGGHLTHGSPVSFSGKFYKAVHYGLNAHGDIDYEQAAQLAQEHKPKVILAGFSAFSGIVDWQRFREIADSVNAYFMTDIAHVAGLVAAGVYPSPVQIADVTTTTTHKTLRGPRAGLILAKANPELEKRLNSAVFPGSQGGPLMHIIAAKAVAFKEAMQPEFKTYAQQILKNAKAMAEVMKERGYTIVSGGTQNHLFLVSLLDKNISGKEAEAALGRANITVNKNTVPGETRSPFVTSGLRIGTPAITTRGFKEKEASQLAHWVCDILDDIHNEKVIADVKQKADELCGKFPVYQELD

SEQ ID NO: 10565 - DNA, 1311 bp, Ralstonia pickettii 12D
  CDS (1)..(1311): transl_table=11
atgtttccccacgcctcgcccgatctccgccatttccgtttcgtttcagaccagacactcgccatgttcgaacgcagccgctatacgatcgaccagatcgatgccgaaatcttcgccgccatccagcaggaaaatcagcgtcaggaagaccacattgagctgatcgcctccgagaactacacctccccggccgtgatggccgcgcagggttcgcaactgaccaacaagtacgccgagggctatcccggcaagcgttactacggcggttgcgaatacgtggacgtggtggaacagctcgccatcgaccgcgtgaagcagctcttcggcgccgaagccgccaacgtgcagccgaactcgggctcgcaggccaaccagggcgtgttcttcgccgtgctcaagccgggtgacacgatcatgggcatgagcctggccgaaggcggccacctgacgcatggcatggcgctcaacatgagcggcaagtggttcaacgtcgtcagctacggcctgaacgcgcaggaagacatcgattacgacgcgctcgaagccctggcgcaagagaagaagccgaagctgatcatcgcaggcgcatccgcctttgcgctgcgcatcgatttcgagcgcatcggcaagatcgccaagtcgatcggcgcgtacttcatggtggacatggcgcactacgccggcctgatcgctgcaggtgtgtacccgaatcccgtgccgcacgctgatttcgtcacgacgaccacccacaagagcctgcgcggcccgcgcggcggcgtgatcctgatgaaggccgagcacgagaaggccatcaactcggcgatcttcccgggtatccagggcggcccgctgatgcacgtgatcgccggcaaggcggtggcgttcaaggaagcgctgtcgccggagttcaaggcttaccagcaacaggtcgtgaagaacgcggccgtcatggctgaaacgctcatggcccgaggcctgcggatcgtgtccggccgcacggagagccacgtgatgctggttgacctgcgcgccaagaagatcactggcaaggaagccgaaaaggtgctgggcgacgcacacatcaccgtcaacaagaacgcgattccgaatgacccggaaaagccgttcgtgacgtcgggcgtgcgcctgggttcgccggccatgaccacgcgtggcttcaaggaagccgaggccgtgaaggtcgcccacctgatcgccgatgtgctggacaatccgcacgacgaagccaacatcgccgccgtgcgcgccaaggtggctgagctgaccaagcagttcccggtctacggctga

SEQ ID NO: 10566 - protein, 436 aa, Ralstonia pickettii 12D
MFPHASPDLRHFRFVSDQTLAMFERSRYTIDQIDAEIFAAIQQENQRQEDHIELIASENYTSPAVMAAQGSQLTNKYAEGYPGKRYYGGCEYVDVVEQLAIDRVKQLFGAEAANVQPNSGSQANQGVFFAVLKPGDTIMGMSLAEGGHLTHGMALNMSGKWFNVVSYGLNAQEDIDYDALEALAQEKKPKLIIAGASAFALRIDFERIGKIAKSIGAYFMVDMAHYAGLIAAGVYPNPVPHADFVTTTTHKSLRGPRGGVILMKAEHEKAINSAIFPGIQGGPLMHVIAGKAVAFKEALSPEFKAYQQQVVKNAAVMAETLMARGLRIVSGRTESHVMLVDLRAKKITGKEAEKVLGDAHITVNKNAIPNDPEKPFVTSGVRLGSPAMTTRGFKEAEAVKVAHLIADVLDNPHDEANIAAVRAKVAELTKQFPVYG

SEQ ID NO: 10567 - DNA, 1287 bp, Eubacterium siraeum DSM 15702
  CDS (1)..(1287): transl_table=11
atgcttaaaataaccgaaaggaaaaatgaaatgtacagtaatttagttgacacgatcggctttctcaagggaatagatcccgatgttgctgacgcaatggacaaggagcttgcccgtcagaaaagaaatcttgagcttattgcaagtgagaatatcgtttctcctgctgttatggcggctatgggaagcgttcttacgaacaagtatgctgagggataccccggcaagcgttattacggcggatgcgaggacgttgatatagttgagaatatcgctattgaacgtgcctgcaagctgttcggagcaaagtatgcgaatgtacaggctcactccggcgcacaggctaacacggcggtttattttgcactgctgaatcccggcgacacggtaatgggtatgagccttgctcacggcggacaccttacacacggttctcccgttaacatttcgggcaaatacttcaacttcgtaccttacggacttgatgaggaaaccggcagactgaattacgacaatatacttgcacttgccaaggagaataagcccaagatgatcgttgcgggtgcgagcgcatatcccagagcaattgactttgaaaagctctcggctattgctaaggaagtcggcgcatatcttatggtagatatggcgcacattgcaggtcttgttgcaggcggtcagcatatgtcgcccgtgccttatgcagatgttgtgactactacaacgcataagacgctgagaggacctcgtggcggacttatccttacaaatgacgaggagcttgcaaagaagatcaacaaggctatattccccggcatacagggcggacctttaatgcacgttatcgccgctaaggctgtatgcttcggcgaggcgctgaagcccgaatttaccgaatatgcaaagcagattgtaaagaacgcatccgttcttgccgattctctgcttgaaaagggattcaatcttgtatcgggcggtacagacaaccaccttatgcttgttgacctccagcctttcaatatcacaggtaaagagcttgagaagaagctcgacgaggtgtatatcacagttaacaagaatgctatacccaacgatcctcagagtcctttcgtaacgagcggcgtgcgcatcggtacacctgcggttaccacaagaggattaaaggaagacgatatgaagcagattgcacagtgcatctatcttactgcgaccgactttgacaacagcgccgacaaggtaagagaaacagtaactgagatctgcagaaagtaccctctgtacgaataa

SEQ ID NO: 10568 - protein, 428 aa, Eubacterium siraeum DSM 15702
MLKITERKNEMYSNLVDTIGFLKGIDPDVADAMDKELARQKRNLELIASENIVSPAVMAAMGSVLTNKYAEGYPGKRYYGGCEDVDIVENIAIERACKLFGAKYANVQAHSGAQANTAVYFALLNPGDTVMGMSLAHGGHLTHGSPVNISGKYFNFVPYGLDEETGRLNYDNILALAKENKPKMIVAGASAYPRAIDFEKLSAIAKEVGAYLMVDMAHIAGLVAGGQHMSPVPYADVVTTTTHKTLRGPRGGLILTNDEELAKKINKAIFPGIQGGPLMHVIAAKAVCFGEALKPEFTEYAKQIVKNASVLADSLLEKGFNLVSGGTDNHLMLVDLQPFNITGKELEKKLDEVYITVNKNAIPNDPQSPFVTSGVRIGTPAVTTRGLKEDDMKQIAQCIYLTATDFDNSADKVRETVTEICRKYPLYE

SEQ ID NO: 10569 - DNA, 1281 bp, Bacteroides stercoris ATCC 43183
  CDS (1)..(1281): transl_table=11
atgaaaagagacgatttaattttcgatatcatcgaaaaagagcatcaacgtcagctcaaaggtattgaactgattgcatcagagaacttcgtaagtgatcaggttatgcaggcaatgggttcctgcctcaccaacaagtatgcagaaggttatcccggcaagcgctactacggcggttgcgaagtcgtagaccaaagcgagcagattgccatcgaccgcctgaaacagattttcggcgcagaatgggcaaacgtacagccgcactcaggtgcacaggccaacgctgccgtattcctcgcagtgctgaacccgggcgacaaattcatgggcctcaaccttgcacacggcggtcacctctctcacggttcgtcagtgaatacttccggcattatctacactccctgcgagtacaacctgaataaagaaaccggacgtgtggactacgaccagatggaagaagtggccctgcgcgagaaaccgaaaatgattatcggcggcggttctgcctattcacgcgaatgggactacaaacgcatgcgcgaaatagccgacaagataggtgctatcctgatggtagacatggcacaccctgccggactgattgccgcaggcgaactggataatcccgtgaaatatgcccatatcgtgacctctaccacccataagacgttgcgcggtcctcgtggcggtgtcatcatgatgggcaaggacttccccaacccctggggcaagaaaacaccgaagggcgaaatcaagatgatgtcccaattgctcgactctgccgtattccccggcattcagggcggcccgctggaacatgtcatcgctgcgaaagccgttgccttcggcgaaattctgcaaccggaatggaaagaatatgccaaacaggtgaagaaaaacgccgctacgctggcacaagccctgatagaccgtggctttaccatcgtttccggcggtacggacaaccactccatgctggtagacctgcgtagcaaatatcccgacctgacaggtaaggtagccgaaaaggcattggtatctgccgacatcaccgtgaacaagaacatggttccgttcgatacccgctccgcattccagacctccggtatccgtctgggtactcccgccatcacaacccgcggcgccaaagaagacctgatgctggaaatcgctgaaatgattgagaccgttctctccaacgtagaaaacgaacaggtcattgccgacgtccgcgcacgcgtaaatgccaagatgaaggaatatccgctgttcgcttactga

SEQ ID NO: 10570 - protein, 426 aa, Bacteroides stercoris ATCC 43183
MKRDDLIFDIIEKEHQRQLKGIELIASENFVSDQVMQAMGSCLTNKYAEGYPGKRYYGGCEVVDQSEQIAIDRLKQIFGAEWANVQPHSGAQANAAVFLAVLNPGDKFMGLNLAHGGHLSHGSSVNTSGIIYTPCEYNLNKETGRVDYDQMEEVALREKPKMIIGGGSAYSREWDYKRMREIADKIGAILMVDMAHPAGLIAAGELDNPVKYAHIVTSTTHKTLRGPRGGVIMMGKDFPNPWGKKTPKGEIKMMSQLLDSAVFPGIQGGPLEHVIAAKAVAFGEILQPEWKEYAKQVKKNAATLAQALIDRGFTIVSGGTDNHSMLVDLRSKYPDLTGKVAEKALVSADITVNKNMVPFDTRSAFQTSGIRLGTPAITTRGAKEDLMLEIAEMIETVLSNVENEQVIADVRARVNAKMKEYPLFAY

SEQ ID NO: 10571 - DNA, 1236 bp, Clostridium sp. SS2/1
  CDS (1)..(1236): transl_table=11
atgtttgattttagcgaagtaaagaactacgatccagaattagcagaagcaatggaaaacgaattaacaagacagagaacaaatcttgagttgatcgcatcagagaaccttgtttccaaagctgttatggctgcaatgggaagtcatttaacaaataaatatgcagagggatatccaggaaaacgttactatggtggatgccagtatgtagatgtggtagaagatcttgcaagagaacgtgccaaagaattatttggatgcgaatatgtaaatgtacagccacactctggagcacaggcaaacatggcagtattcttcgcagtattgaatgtcggagatacatacatgggaatgagcttagaccacggtggacatttaacacacggaagcccagtcaacatgtctggtaagaactatcactgcgtaccatacggagttaatgatgaaggattcatcgattatgatgaagtagaaagaatcgcattagaatgcaaaccaaagatgatcattgctggtgcaagtgcatacgcaagagcgatcgacttcaaacgtttccgtgagatcgctgacaaagttggggcagttttaatggtagatatggctcatatcgcaggattagtagctgcaggattacaccagagcccaatcccttatgctcatgtaacaacaacaacaacacataagacattaagaggacctcgtggtggaatgatcatgtgcagcaatgaagtgaacgaaaaatacaacttcaacaaagcaatcttcccaggaatccagggtggaccattaatgcatgtgatcgctggtaaagctgtagcattcaaagaagcattagacccatcattcaaagaatatatgacacaggttgtgaagaatgcagatactcttgcaaatgcactgatcgaagaaggattcgatatcgtatctggaggaacagacaaccacttaatgttagtagatcttaagaaatatgatctgacaggaaaagaagctgaaaaagtactggattctgtacatatcacatgtaataagaatactgtaccaaacgatccaaaatctccattcgtaacatcaggacttcgtcttggaacaccagctgttacaactcgtggactgaaagaagacgatatgaaagtgatcgcaaaagctattcgtctgacattattagacaagaaacttgatgaagcaaacgaattagtattaggattaacagaaaaatatccactctatgaataa

SEQ ID NO: 10572 - protein, 411 aa, Clostridium sp. SS2/1
MFDFSEVKNYDPELAEAMENELTRQRTNLELIASENLVSKAVMAAMGSHLTNKYAEGYPGKRYYGGCQYVDVVEDLARERAKELFGCEYVNVQPHSGAQANMAVFFAVLNVGDTYMGMSLDHGGHLTHGSPVNMSGKNYHCVPYGVNDEGFIDYDEVERIALECKPKMIIAGASAYARAIDFKRFREIADKVGAVLMVDMAHIAGLVAAGLHQSPIPYAHVTTTTTHKTLRGPRGGMIMCSNEVNEKYNFNKAIFPGIQGGPLMHVIAGKAVAFKEALDPSFKEYMTQVVKNADTLANALIEEGFDIVSGGTDNHLMLVDLKKYDLTGKEAEKVLDSVHITCNKNTVPNDPKSPFVTSGLRLGTPAVTTRGLKEDDMKVIAKAIRLTLLDKKLDEANELVLGLTEKYPLYE

SEQ ID NO: 10573 - DNA, 1242 bp, Clostridium botulinum NCTC 2916
  CDS (1)..(1242): transl_table=11
atggactttacaaatttaaaaaacacagatccagagctattagacatgataaagaaagaagaagaaagacaagaatataatatcgaattaatagcttcagaaaattttactagtttatctgtaatggaggctatgggatctttattgacaaataaatatgcagaaggatacccacataaaagatattatggaggatgtgaatttgtagatgaggtagaggatctagcaagagaaagattaaaaaaattatttgctgcagaacatgccaatgtacaaccacattctggttcacaagccaatatggcagtttatatgtctgtgcttcagactggtgatactatattaggtatggatttatcccatggcggacatttaacccatggaagtccagtaaatttttcaggaaaattatataattttatatcctatggtgtagataaagaaacagaaactatagattatgatcaattaaagaaaatagccttagaaaatagacctaaaatgatagtatctggagctagtgcttatcctagaattatagattttgaaaagataagagaaatttgtgatgaaatagatgcttatatgatggtagatatggctcatatagcaggattggtagctacaggattacatccatcaccagtaccttatgcagattttgtcacaacaactactcataaaactttaagaggacctagaggtggagctattttatgtaaagaaaaatatgcaaaagcagtagataaagctatattcccaggcattcaggggggcccattaatgcatactatagcagcaaaagctgtttgttttggggaagctttaagagaagattataaagaatatatgaagcaagttgttaaaaatactaaagttttaggagaagaattaaaaaattatggatttagactaatatctggtggtacagataaccatttattactaatagatttaactaataaaaatataacaggaaaagatgcagaaaaacttttagattcagtaggaattactgtgaataaaaatacaataccttttgaaactttaagcccttttataactagtggaattagaataggaactccagcggtaactacgagaggatttaaggaagaggaaatgaaaaaaatagcctatttcatgaattattctatagaacatagggaagagaatttatctcaaataaaagagcaaataaaagaaatttgtaaaaaatacccattgtatcaaaatgcataa

SEQ ID NO: 10574 - protein, 413 aa, Clostridium botulinum NCTC 2916
MDFTNLKNTDPELLDMIKKEEERQEYNIELIASENFTSLSVMEAMGSLLTNKYAEGYPHKRYYGGCEFVDEVEDLARERLKKLFAAEHANVQPHSGSQANMAVYMSVLQTGDTILGMDLSHGGHLTHGSPVNFSGKLYNFISYGVDKETETIDYDQLKKIALENRPKMIVSGASAYPRIIDFEKIREICDEIDAYMMVDMAHIAGLVATGLHPSPVPYADFVTTTTHKTLRGPRGGAILCKEKYAKAVDKAIFPGIQGGPLMHTIAAKAVCFGEALREDYKEYMKQVVKNTKVLGEELKNYGFRLISGGTDNHLLLIDLTNKNITGKDAEKLLDSVGITVNKNTIPFETLSPFITSGIRIGTPAVTTRGFKEEEMKKIAYFMNYSIEHREENLSQIKEQIKEICKKYPLYQNA

SEQ ID NO: 10575 - DNA, 1242 bp, Clostridium botulinum Bf
  CDS (1)..(1242): transl_table=11
atggactttacaaatttgaaaaacacagatccagagctattagacatgataaagaaagaagaggaaagacaggaatataatatcgaattaatagcctcagaaaattttactagtttatctgtaatggaggctatgggatctttattgacaaataaatatgcagaaggatacccacataaaagatattatggaggatgtgaatttgtagatgaggtagaggatttagcaagagaaagattaaaaaaattatttgctgcagaacatgctaatgtacaaccacattctggttcacaagccaatatggcagtttatatgtctgtgcttcagactggtgatactatattaggtatggatttatcccatggcggacatttaactcatggaagtccagtaaatttttcaggaaaattatataattttatatcctatggcgtagataaagaaacagaaactatagattatgagcaattaaagaaaatagctttagaaaatagacctaaaatgatagtatctggagctagtgcttatcctagaattatagattttcaaaagataagagaaatttgtgatgaaatagatgcttatatgatggtagatatggctcatatagcaggattagtagctacaggattacatccatcgccagtaccttatgcagattttgttacaacaactactcataaaactttaagaggacctagaggtggcgctattttatgtaaagaaaaatatgcaaaagcagtagataaagctatattcccaggcattcaagggggaccattaatgcatactatagcagcaaaagccgtttgttttggggaagctttaagagaagattataaagaatatatgcagcaagttgttaaaaatactaaagttttaggagaagaattaaaaaattatggatttaggctaatatctggtggtacagataaccatttattactaatagatttaactaataaaaatataacaggaaaagatgcagaaaaacttttagattcagtaggaattactgtgaataaaaatacaataccttttgaaactttaagcccttttataactagtggaattaggataggaactccagcagtaactacaagaggatttaaggaagaggaaatgaaaaaaatagcctatttcatgaattattctatagaacatagagaagagaatttatctcaaataaaagagcaaataaaagaaatttgtaaaaaatacccattgcatcaaaatgcataa

SEQ ID NO: 10576 - protein, 413 aa, Clostridium botulinum Bf
MDFTNLKNTDPELLDMIKKEEERQEYNIELIASENFTSLSVMEAMGSLLTNKYAEGYPHKRYYGGCEFVDEVEDLARERLKKLFAAEHANVQPHSGSQANMAVYMSVLQTGDTILGMDLSHGGHLTHGSPVNFSGKLYNFISYGVDKETETIDYEQLKKIALENRPKMIVSGASAYPRIIDFQKIREICDEIDAYMMVDMAHIAGLVATGLHPSPVPYADFVTTTTHKTLRGPRGGAILCKEKYAKAVDKAIFPGIQGGPLMHTIAAKAVCFGEALREDYKEYMQQVVKNTKVLGEELKNYGFRLISGGTDNHLLLIDLTNKNITGKDAEKLLDSVGITVNKNTIPFETLSPFITSGIRIGTPAVTTRGFKEEEMKKIAYFMNYSIEHREENLSQIKEQIKEICKKYPLHQNA

SEQ ID NO: 10577 - DNA, 1233 bp, Clostridium perfringens NCTC 8239
  CDS (1)..(1233): transl_table=11
atgaattttgacaacttagaaagagaagatgagcaaattgcacatcttgttcaaaaggaaaaagaaagacaagaaaatagtatagagcttatagcttcagaaaactttgttagcaaagctgttatggaagctatgggatcatatttaacaaataaatatgctgaaggttacccttcaaaaagatattatggtggatgtcacgtagtagatgaggttgaagatttagcaagagaaagagtaaaaaaattatttggggctgagcatgctaatgtacaaccacattcaggatcacaagctaatatggctgtttatttttcaatattagagccaggtgatactgtattaggaatggatttaagccatggaggacacttaactcatggttcaccagttaacttttcaggtagattatttaatttcgtgtcatatggtgtagataaagagacagaaacaataaattatgaaactgtaagagaattagctcttaaacataaacctaaattaatagttgcaggagctagtgcatattcaagaatcatagattttaaaactttaagagagatagcagatgaggtaggagcatacttaatggttgatatagctcatattgcagggcttgtagctacaggattacatccatcaccagttccttatgctgattttgttacatcaacaactcataaaactttaagaggaccaagaggtggattaatactttgtaaagaaaaatttgcaaaagcattagataagaatatcttcccaggaatacaaggtggtcctttaatgcatataatagctgcaaaggctgtttgttttaaagaagcattagaaccaagttttaaaacatatatggagcaagttgttaaaaatgcacaggttttagcagaagctttagaatcttatggatttaaattagtttcaaatggaactgataaccatttaatacttgttgatttaactaataaagatataactggtaaagatgcagaaattcttttagatagtataggaataactttaaacaaaaatactgtaccaaatgaaacaagaagcccatttgttactagtggtgttagaataggaactcctgctataacaactagaggatttaaagaagaagaaatgaaagaaatagcttctataataaatgatgctattaaagaaaaagatggagatttagaactattaaaagcaagagttaaagctttatgtgctaaatatcctttatattaa

SEQ ID NO: 10578 - protein, 410 aa, Clostridium perfringens NCTC 8239
MNFDNLEREDEQIAHLVQKEKERQENSIELIASENFVSKAVMEAMGSYLTNKYAEGYPSKRYYGGCHVVDEVEDLARERVKKLFGAEHANVQPHSGSQANMAVYFSILEPGDTVLGMDLSHGGHLTHGSPVNFSGRLFNFVSYGVDKETETINYETVRELALKHKPKLIVAGASAYSRIIDFKTLREIADEVGAYLMVDIAHIAGLVATGLHPSPVPYADFVTSTTHKTLRGPRGGLILCKEKFAKALDKNIFPGIQGGPLMHIIAAKAVCFKEALEPSFKTYMEQVVKNAQVLAEALESYGFKLVSNGTDNHLILVDLTNKDITGKDAEILLDSIGITLNKNTVPNETRSPFVTSGVRIGTPAITTRGFKEEEMKEIASIINDAIKEKDGDLELLKARVKALCAKYPLY

SEQ ID NO: 10579 - DNA, 1254 bp, Salmonella enterica subsp. enterica serovar Schwarzengrund str. SL480
  CDS (1)..(1254): transl_table=11
atgttaaagcgtgaaatgaacattgccgattatgatgccgaattgtggcaggctatggagcaggaaaaagtacgtcaggaagagcacatcgaactgatcgcctccgaaaactacaccagcccgcgcgtgatgcaggcgcaggggtctcagctgaccaacaaatacgctgaaggttatccgggcaagcgctactacggcggttgcgaatacgttgatattgtagagcaactggctatcgaccgcgcgaaagaactgttcggcgccgactacgctaacgtgcagccgcactccggttctcaggctaacttcgctgtttacaccgcgctgctgcagccgggcgataccgttctgggtatgaacctggcgcagggcggccacctgactcacggctccccggttaacttctccggtaaactgtacaacatcgtaccttacggtatcgatgagtccggtaaaattgactatgacgagatggcgaagctggccaaagagcacaagccgaagatgattatcggtggcttctctgcctactccggcgtggttgactgggcaaaaatgcgtgaaatcgctgatagcattggcgcatacctgtttgtcgacatggcgcacgtagcgggcctgattgccgcaggcgtttacccgaacccggttccgcacgctcacgttgtcaccaccaccacccacaaaaccctggcgggtccgcgcggcggcctgatcctggcgaaaggcggcgacgaagagctgtacaaaaaactgaactctgccgtcttcccaagcgcgcagggcggcccgctgatgcacgtgatcgccggtaaagcggtagcgctgaaagaagcgatggagccggagttcaaagtctaccagcagcaggtggcgaaaaacgccaaagcgatggtggaagtgttcctgaaccgcggctacaaagtggtgtctggcggcactgagaaccacctgttcctgctggacctggtggataaaaacctgaccggtaaagaagctgacgccgcgctgggccgtgctaacatcaccgtgaacaaaaacagcgtgccgaacgatccgaagagcccgttcgtgacctccggtatccgtatcggttccccggcggttactcgtcgcggcttcaaagaagcggaagtgaaagagctggctggctggatgtgcgacgtgctggacaacatcaatgatgaagccaccattgaacgcgtgaaagcgaaagtactggatatctgcgcccgcttcccggtttacgcgtaa

SEQ ID NO: 10580 - protein, 417 aa, Salmonella enterica subsp. enterica serovar Schwarzengrund str. SL480
MLKREMNIADYDAELWQAMEQEKVRQEEHIELIASENYTSPRVMQAQGSQLTNKYAEGYPGKRYYGGCEYVDIVEQLAIDRAKELFGADYANVQPHSGSQANFAVYTALLQPGDTVLGMNLAQGGHLTHGSPVNFSGKLYNIVPYGIDESGKIDYDEMAKLAKEHKPKMIIGGFSAYSGVVDWAKMREIADSIGAYLFVDMAHVAGLIAAGVYPNPVPHAHVVTTTTHKTLAGPRGGLILAKGGDEELYKKLNSAVFPSAQGGPLMHVIAGKAVALKEAMEPEFKVYQQQVAKNAKAMVEVFLNRGYKVVSGGTENHLFLLDLVDKNLTGKEADAALGRANITVNKNSVPNDPKSPFVTSGIRIGSPAVTRRGFKEAEVKELAGWMCDVLDNINDEATIERVKAKVLDICARFPVYA

SEQ ID NO: 10581 - DNA, 1236 bp, Geobacillus sp. WCH70
  CDS (1)..(1236): transl_table=11
atgaactacttgccacaacaagatccgcaagtatttgaagcgattcaaaatgagttgaaacggcagcaatcaaaaattgaattaatcgcgtcagaaaattttgtcagccgcgctgttatggaagcgcaaggatcggtattaacgaataaatatgctgaaggatatccgggccgccgctattatggtggctgcgaatatgtcgatgtcgtcgaggatctcgcgcgcgaacgggcgaaaaaattgtttggcgcggaacatgccaacgtacagccgcattctggcgcacaagcgaacatggcggtatattttactgttttggaacatggcgatacggtgcttgggatgaatttgtcgcacggcggtcatttaacgcatggcagcccagtcaactttagcggcattcaatataactttgtcgaatatggtgtcgatccagaaacacatgtcattgattatgatgatgtgcttgaaaaagcgcgcatacataagccgaaactgattgtagcaggggcaagcgcttatccgcgcatcatcgattttaaacgtttccgtgaaatcgctgatgaagtaggggcgtacttgatggtagacatggcgcacattgcaggtcttgttgcggcaggtcttcatccaaatccggtgccatatgcgcattttgtgaccacaacaacgcataagacgctccgcgggccgcgcggcggcatgatcctttgcaaagaagagtttgcaaaacaaattgacaaagcgatcttcccaggcattcaaggcggaccgctcatgcacgtcatcgcggcgaaagcagtcgcgctcggtgaagcactgcaagacagctttaaaacatatgcgcaaaatatcatcaacaacgcaaaacgcctcgcggaagcattgaaaaaagaaggctttacactcgtttccggcggaacagacaaccacttgttgttaattgatttacgttcccttggcctcactggaaaagtggcggaaaaagtgttggacgaagtcggtatcaccgtcaacaaaaatacgattccgtacgatccggaaagcccatttgtgacaagcggcatccgtatcggcaccgccgcggtaacgacgcgcggattcggtttggaagaaatggatgaaatcgcaagcattattagtcttacattaaaacatcacgaagacggagcaaaattggaagaagcgcgaaaacgcgtagcggcattaacggaaaaattcccattatatcgttga

SEQ ID NO: 10582 - protein, 411 aa, Geobacillus sp. WCH70
MNYLPQQDPQVFEAIQNELKRQQSKIELIASENFVSRAVMEAQGSVLTNKYAEGYPGRRYYGGCEYVDVVEDLARERAKKLFGAEHANVQPHSGAQANMAVYFTVLEHGDTVLGMNLSHGGHLTHGSPVNFSGIQYNFVEYGVDPETHVIDYDDVLEKARIHKPKLIVAGASAYPRIIDFKRFREIADEVGAYLMVDMAHIAGLVAAGLHPNPVPYAHFVTTTTHKTLRGPRGGMILCKEEFAKQIDKAIFPGIQGGPLMHVIAAKAVALGEALQDSFKTYAQNIINNAKRLAEALKKEGFTLVSGGTDNHLLLIDLRSLGLTGKVAEKVLDEVGITVNKNTIPYDPESPFVTSGIRIGTAAVTTRGFGLEEMDEIASIISLTLKHHEDGAKLEEARKRVAALTEKFPLYR

SEQ ID NO: 10583 - DNA, 1260 bp, Chloroflexus sp. Y-400-fl
  CDS (1)..(1260): transl_table=11
atgcttgaacatcttcgagcaactgatccgatcatcgccgatctgatcgagcgggaagcgcaacgccagcgccagggtctggagttaatcgccagcgagaactataccagcctggcggtgatggaggcgcagggatcggtcttgaccaataagtacgcagagggtttgcccggtcggcgatattacggtggttgcgagtttgttgacgccatcgagcaactggctattgaacgggcctgtcagttgttcggcacgtcccacgctaatgtgcaaccgcacagtggggcgcaggccaatatcgccgtgtttacggctctgctccagcccggtgataccattctcggtatgcgcctggatcacggtgggcatctgacgcacggtagcccggtcaatttctccggtaagtggtacaacgtccatttctacggtgtggacgcgcaaaccggtcagatcgactatgacgatctggcaagcaaagcacgggcaatccggccaaagctcatcacgtcgggagcaagtgcatacccgcgtatcatcgattttgcccggatgcgtcagatcgccgatgaggttggcgccctgttgatggccgatattgcccatatcgccggtctggtggctgccggcgagcatccatcacccgtcggtcacgctcatgtgattaccacaactacccataagacgttacgcgggccacggggcggcttgatcttgatgggtgatgattttgcgaaacaactcaactcaagcgtcttccccggtacgcagggtgggccattgatgcacgtgatcgccggtaaggcagttgctttcggtgaagcattgcggcctgagttcaggcagtatgcggcgcaaatccgccgcaatgcccgtgcgctggccgagggattgatggcgcaggggctgaccctggttagcggtgggactgataatcatctgatgctggtcgatctgcgcagtacgggcctaaccggcgcacaggcacagcgcgcacttgataaagcggcgattacggtcaacaaaaatgccatccccgatgatccacaaccgccaatgaagacgagtgggattcggatcgggacacccgcggtaacgacccgcggtatgcgcgaaccagagatggctcagattgcggcctggattggcgaggtgctgatgtaccccgatgatgaagcccgcctgaatcggatcgcaggcgaagtcgccgatttgtgccggcatttcccggtgcctgctgatatggtgcaggtacgggggtaa

SEQ ID NO: 10584 - protein, 419 aa, Chloroflexus sp. Y-400-fl
MLEHLRATDPIIADLIEREAQRQRQGLELIASENYTSLAVMEAQGSVLTNKYAEGLPGRRYYGGCEFVDAIEQLAIERACQLFGTSHANVQPHSGAQANIAVFTALLQPGDTILGMRLDHGGHLTHGSPVNFSGKWYNVHFYGVDAQTGQIDYDDLASKARAIRPKLITSGASAYPRIIDFARMRQIADEVGALLMADIAHIAGLVAAGEHPSPVGHAHVITTTTHKTLRGPRGGLILMGDDFAKQLNSSVFPGTQGGPLMHVIAGKAVAFGEALRPEFRQYAAQIRRNARALAEGLMAQGLTLVSGGTDNHLMLVDLRSTGLTGAQAQRALDKAAITVNKNAIPDDPQPPMKTSGIRIGTPAVTTRGMREPEMAQIAAWIGEVLMYPDDEARLNRIAGEVADLCRHFPVPADMVQVRG

SEQ ID NO: 10585 - DNA, 1254 bp, Exiguobacterium sp. AT1b
  CDS (1)..(1254): transl_table=11
atggtaaacacgacgaagttgaaagtgcaggatgcggaattgtttgaggcaatgcaacacgagctcggtcgtcagcgcgacaacatcgaactcatcgcttcagaaaactttgtttcagaagcggtcatggaagcgcaaggaggcgtattgacgaacaaatatgccgaaggatatccgggacgccgttactatggtggctgtgagtttgtcgacgtcgctgagaacttggcgcgtgaccgtgcgaaagaattgttcggtgcagaacatgcgaacgtacaaccacactcgggtgcacaagcgaacatggcggtctacttcacggtgcttgaagcaggagatacggttctcggaatgaacctgtctcatggtggtcacttgacgcacgggagtccggtcaacttctcaggtgtgcaatataacttcgtcgaatacggtgtagacaaagagacagaacacatcgattatgacgtcgtcgctgcacttgctaaagaacataagccgaaattgattgtcgcgggagcatcagcatacccacgtacgatcgacttcgcgaaattccgtgagatcgcggacagtgtcgatgcttaccttatggtcgatatggcgcacatcgctggactcgtggcagcggggcttcacccgaacccggtcgagcatgcgcacttcgtcacgacgacgacgcataagacgcttcgtggaccacgtggcggaatgattctttgtaaagaagagttcgccaaagcgatcgacaagtcgattttcccagggattcaaggtggaccactcatgcacgtcatcgcagcgaaagcggtcgcgttcggtgaggcactccaaccggaattcaaagattaccaacgtcaagtcattgcgaatgcgcaagcacttgcggcaggtcttgaagaagagggactccgaatcgtatcgggcggaacggacaatcacctcttgctcgtcgatcttcgaggaatcgacatcacaggtaaagcggctgagcatgcactagatgcagcgggaatcacagtcaataaaaacacgattccattcgacccggcatcaccgttcgtcacaagcggaatccgtctcggaacggctgcgatgacgactcgtggtttcaaagaaacggatatgaaagaagtggcacgtctcatcgggcgtgtgctcaaacaacatgaagacgaggcggtaatcgcggaagcacttcaagacgtgcgattgttaacggcgaagttcccgctttaccctgaacgaggctga

SEQ ID NO: 10586 - protein, 417 aa, Exiguobacterium sp. AT1b
MVNTTKLKVQDAELFEAMQHELGRQRDNIELIASENFVSEAVMEAQGGVLTNKYAEGYPGRRYYGGCEFVDVAENLARDRAKELFGAEHANVQPHSGAQANMAVYFTVLEAGDTVLGMNLSHGGHLTHGSPVNFSGVQYNFVEYGVDKETEHIDYDVVAALAKEHKPKLIVAGASAYPRTIDFAKFREIADSVDAYLMVDMAHIAGLVAAGLHPNPVEHAHFVTTTTHKTLRGPRGGMILCKEEFAKAIDKSIFPGIQGGPLMHVIAAKAVAFGEALQPEFKDYQRQVIANAQALAAGLEEEGLRIVSGGTDNHLLLVDLRGIDITGKAAEHALDAAGITVNKNTIPFDPASPFVTSGIRLGTAAMTTRGFKETDMKEVARLIGRVLKQHEDEAVIAEALQDVRLLTAKFPLYPERG

SEQ ID NO: 10587 - DNA, 1248 bp, Geobacter sp. M21
  CDS (1)..(1248): transl_table=11
atgtcagtactggaaacattcgatccggcagtcgcggaggtcatcaggcacgagactgagcgccaggagtacaacctcgaactgatcgcctcggagaacttcgtctccccggcggtgctcgaggcgcagggctcggtcctcaccaacaagtacgcggaagggtatcccggcaagcgttactacgggggttgccactgcgtcgacgtggtggagaacttagccatcgaccgcgccaaggagctcttcggcgccgaccacgtgaacgtgcagccgcactccggttcccaggccaacatggctgtctacttctccgtcctgaagcccggcgacaccgtgctcgggatgaacctggcccacggcggccacttgacccacggcagcccggtcaacttctccggcaagctcttcaacatcgtcccctacggcgtctccaaggagacccagaccatcgactacgaggagaccgagcgtctcgccctcgagcacaagccgaagatgatcgtggtcggcgcctcggcctatccgcgcatcatcgacttcgaggccttccgtcgcatcgccgacaaggtcggggccgtggtcatggtggacatggcgcacatagccggcctcgtcgcggcagggctgcacccgagcccggttccctacgccgagttcgtcaccaccaccacccacaagaccctgcgcggcccgcgcggcggcatgatcatgtgccgcgaggagtgggccaagaccctcaactccaacatcttcccggggatccagggcggcccgctcatgcacgtgatcgccgccaaggccgtcgccttcaaggaggcgctgacccccgagttcaaaaagtaccaggagcagatcgtgaagaacgccaaggcgctcgccgaagggctcaccaagcgcggcttcaagctcacctccggcgggaccgacaaccacctgatgctggttgacctctcccagaccgagctgaccggcaaggtagccgaggaggcgctcgaccgcgccgggatcaccgtcaacaaaaacggcatccccttcgacacccgctcgccgttcatcacctccggcatccgcatcggcaccccggctgcgaccagccacgggctgaaagaggccgagatggagcaggttgcaggtttcatcgccgacgtcctgggcaacgtgaccgacgaggccaagctcgcggcagtgaagacccaggtcaacgcgctgatgaagcgtttccccatgtacgccgaccgcctcgcctag

SEQ ID NO: 10588 - protein, 415 aa, Geobacter sp. M21
MSVLETFDPAVAEVIRHETERQEYNLELIASENFVSPAVLEAQGSVLTNKYAEGYPGKRYYGGCHCVDVVENLAIDRAKELFGADHVNVQPHSGSQANMAVYFSVLKPGDTVLGMNLAHGGHLTHGSPVNFSGKLFNIVPYGVSKETQTIDYEETERLALEHKPKMIVVGASAYPRIIDFEAFRRIADKVGAVVMVDMAHIAGLVAAGLHPSPVPYAEFVTTTTHKTLRGPRGGMIMCREEWAKTLNSNIFPGIQGGPLMHVIAAKAVAFKEALTPEFKKYQEQIVKNAKALAEGLTKRGFKLTSGGTDNHLMLVDLSQTELTGKVAEEALDRAGITVNKNGIPFDTRSPFITSGIRIGTPAATSHGLKEAEMEQVAGFIADVLGNVTDEAKLAAVKTQVNALMKRFPMYADRLA

SEQ ID NO: 10589 - DNA, 1254 bp, Thioalkalivibrio sp. HL-EbGR7
  CDS (1)..(1254): transl_table=11
atgttttccatccagatgggtatcgcaggttatgacgacgaactctggcaggccatcgaatccgaggcccgtcgccaggaagagcacatcgagctgatcgcctcggaaaactatgccagcccccgggtcatggaggcccagggctcggtgctcaccaacaagtacgccgagggctaccccggcaagcgctactacggcggctgcgagtacgtggacatcgccgagcagctggccatcgaccgggtgaagcagttgttcggtgccgactacgccaacgtgcagccccattccggctcccaggccaatgccgccgtgtacatggccctgctcaaccccggcgacaccgtgctgggcatgagtcttgcccatggcggtcacctgacccacggcgccaaggtcaacttctccggcaagatctatcacgccgtccagtacggcatcgacgaccagggctacatcgacttcgacgaggtggagcgcctggccctggaacacaagcccaagatgatcgtgggcggtttctccgcctactcccgtgagatcgactggcagaagttccgcgacatcgccgacaaggtgggcgcctacctgctggtggacatggcccacgtggcgggcctggtggcggcgggcatctacccgagcccggtgcagatcgcggatgtgaccacctcgaccacccacaagaccctgcgcggcccccgcggcggcatcatcctggccaagagcaaccccgacatcgagaagaagctcaactccctggtgttccccggcacccagggcggccccctgatgcacgtgatcgccgccaaggccgtggccttcaaggaagcgcttgagcccggcttcaaggactaccagaagcaggtggtggccaacgcccgcaccatggccgccaccctgatggagcgcggctacaagatcgtctccggcggcaccgacaaccacctgttcctggtggacctgatcgacaagggcctgaccggcaaggccgccgacgcagccctgggcaatgccaacatcacggtgaacaagaacgccgtgcccaacgacccccagtccccgttcgtcaccagcggcatccgcatcggcacccccgccatcaccacccgcggcttcggcgagcaggaatgcaaggacctggccggctggatctgcgacgtgcttgatgatcacgagaacggcgcggtcatcgagcaggtcaaggcgaaggtcctggatgtctgcgcgcgtttccccgtctacgggcactga

SEQ ID NO: 10590 - protein, 417 aa, Thioalkalivibrio sp. HL-EbGR7
MFSIQMGIAGYDDELWQAIESEARRQEEHIELIASENYASPRVMEAQGSVLTNKYAEGYPGKRYYGGCEYVDIAEQLAIDRVKQLFGADYANVQPHSGSQANAAVYMALLNPGDTVLGMSLAHGGHLTHGAKVNFSGKIYHAVQYGIDDQGYIDFDEVERLALEHKPKMIVGGFSAYSREIDWQKFRDIADKVGAYLLVDMAHVAGLVAAGIYPSPVQIADVTTSTTHKTLRGPRGGIILAKSNPDIEKKLNSLVFPGTQGGPLMHVIAAKAVAFKEALEPGFKDYQKQVVANARTMAATLMERGYKIVSGGTDNHLFLVDLIDKGLTGKAADAALGNANITVNKNAVPNDPQSPFVTSGIRIGTPAITTRGFGEQECKDLAGWICDVLDDHENGAVIEQVKAKVLDVCARFPVYGH

SEQ ID NO: 10591 - DNA, 1248 bp, Thioalkalivibrio sp. HL-EbGR7
  CDS (1)..(1248): transl_table=11
atgtttgaccgcgaacaataccgactggatcgcattgaccctgaaatattcaacgccattcaaaacgaaaaccggcgtcaggaagagcatattgaactgatcgcatcggaaaactacacctcaccggccgtcatggcggcgcagggatcccagctcaccaataaatacgccgaaggttatcccggcaagcgctattacggcggctgcgaacatgtggatgtggtggaacaactggccatcgaccgagtgaaggcgctgtttggcgccgaagccgcaaacgtgcaaccgaactccggctcccaggccaaccaaggcgtattcttcgccatattgcaaccgggcgacaccattatgggcatgaacctggccgaaggcggtcacctcacccatggcatggcgctgaacatgagcggcaaatggttcaatgtggtgagctacggcctgaacgccgaagaagacatcgattacgaagccctggagcgcaagactcgcgcgagcaaaccgaaactcatcatcgccggtgcctcggccttcgcgctgtgcatcgacttcgagcgcatcgcgcgcgtggcgaaggaagtgggcgcgtatttcatggtggacatggcgcactatgcaggcctgatcgccgccagggtttaccctaaccctgtgcctcatgccgacttcgtcaccaccactacacacaaaagcctgcgcggcccgcgcggtggtgtgatcctgatgaaggccgaatacgagaaggcgatcaactcggctatattccccggcatccagggcggtccgctgatgcacgtgattgccgccaaggcggtcgcattcaatgaagccatgacacccgagttccgggcctaccagcaacaagtcataaagaacgcagcggtgctggcggacaccttgatcgcgcgtggcctgcgcatcgtctccggccgcaccgaaagccatgtgatgctcgttgacctgcgcgccaagcagatcaccggcaaggaagccgagcgtgtcctcggcgaggcccacatcacggtcaataaaaacgccatccccaacgaccccgagaagccgttcgttacctcgggcattcgcctcggttctcccgccatgaccacgcgcggtttccgcgaggacgaagcgcgtcaggtcgggcacctaatcgccgatgttcttgactcacctcaggagcccgggcgcattgtccaggttcgcgaacacgtcgcgacgctgacacaggcgtttccagtctatcgctga

SEQ ID NO: 10592 - protein, 415 aa, Thioalkalivibrio sp. HL-EbGR7
MFDREQYRLDRIDPEIFNAIQNENRRQEEHIELIASENYTSPAVMAAQGSQLTNKYAEGYPGKRYYGGCEHVDVVEQLAIDRVKALFGAEAANVQPNSGSQANQGVFFAILQPGDTIMGMNLAEGGHLTHGMALNMSGKWFNVVSYGLNAEEDIDYEALERKTRASKPKLIIAGASAFALCIDFERIARVAKEVGAYFMVDMAHYAGLIAARVYPNPVPHADFVTTTTHKSLRGPRGGVILMKAEYEKAINSAIFPGIQGGPLMHVIAAKAVAFNEAMTPEFRAYQQQVIKNAAVLADTLIARGLRIVSGRTESHVMLVDLRAKQITGKEAERVLGEAHITVNKNAIPNDPEKPFVTSGIRLGSPAMTTRGFREDEARQVGHLIADVLDSPQEPGRIVQVREHVATLTQAFPVYR

SEQ ID NO: 10593 - DNA, 1572 bp, Vitis vinifera
  CDS (1)..(1572)
  misc_feature (696)..(696): y is t or c
  misc_feature (878)..(878): r is g or a
  misc_feature (1218)..(1218): r is g or a
  misc_feature (1251)..(1251): y is t or c
  misc_feature (1334)..(1334): y is t or c
  misc_feature (1392)..(1392): m is a or c
  misc_feature (1403)..(1403): y is t or c
  misc_feature (1430)..(1430): m is a or c
  misc_feature (1482)..(1482): s is g or c
  misc_feature (1536)..(1536): y is t or c
atggcgatggcaatggcgctttggaggctttcatcgtccgtcaacaagcccgttcgtagcgtcttcaatggcggttccatctattacatggcatctttaccgaatgaagctgtatacgaggaggagaaatctcgtgttacatggccaaagcagttgaatgctccgctgggggttgtggatcctgaaattgcagacattatagagctcgagaaagcaagacaatggaaggcacttgaactcgtaccctccgagaacttcacttctgtgtcagttatgcaagctgttgggtctattatgacaaacaatgtcagcgaaggatatccaggcgctagatactatggaggaaatgagtacattgacatggcagaatccttgtgccagaagcgtgctttggaagcatttcggttggatcctgcaaaatggggagtgaacgtgcagtctttatctggctcgcctgcaaattttcaagtttacactgcactattaaaacctcatgaaagaattatggcacttgatcttcctcatggtggacatctttctcatggctatcagactgacaccaagaaaatatctgcagtgtctatattttttgagacaatgccatatagattgaatgagagcactggctacattgactatgaccagttggaaaaaagtgccacactcttcagaccaaaacttatagttgctggtgcyagtgcttatgcccgtctctatgattatgcacatattcgcaaggtttgtgacaagcagaaagctatcttgttggcagatatggcacatattagtgggttggttgcggctggtgttatcccatcaccatttgagtatgcagatatagtgacaaccacaacctacaagtcgctccgtggaccacrtggagccatgattttcttcaagaagggggtaaaagaggttaataaacaagggaaagaggttttgtatgactatgaagacaaaatcaatcaggctgtctttcctggacttcaaagtgcccctcacaatcacacaattgctggcttagctgttgcattgaaacaggctactactccagaatacaaagcttatcaagaacaagttctctctaattgttcaaagtttgcagagactttgatgaagaagggttatgaacttgtttctggtggaactgagaaccatttagtcttagtgaatttgaagaacaagggtattgatggctccagagttgaaaaggtgttrgaatctgttcatattgtagctaacaaaaacacygttcctggagatgtgtcggccatggttcctagtggcatcaggatgggtagagattttgttaaagtagcagaatactttgacgytgctgtgaccgtggcagtgaagatcaaggctgaaactacagggacaaagttgaaggamttcttagccayaatgcagtctagccctcacctccaatmtgagattgcaaagcttcgccacgagggggtagaaaccttacaaattttcctsttgcctaaagaagtatcctttacaaagtttaggcttcaaaagtttgttaccatygaccatttgactgctaatgtttccacacatacatga

SEQ ID NO: 10594 - protein, 523 aa, Vitis vinifera
  misc_feature (293)..(293): The Xaa at location 293 stands for Arg, or His.
  misc_feature (445)..(445): The Xaa at location 445 stands for Ala, or Val.
  misc_feature (464)..(464): The Xaa at location 464 stands for Asp, or Glu.
  misc_feature (468)..(468): The Xaa at location 468 stands for Ile, or Thr.
  misc_feature (477)..(477): The Xaa at location 477 stands for Ser, or Tyr.
MAMAMALWRLSSSVNKPVRSVFNGGSIYYMASLPNEAVYEEEKSRVTWPKQLNAPLGVVDPEIADIIELEKARQWKALELVPSENFTSVSVMQAVGSIMTNNVSEGYPGARYYGGNEYIDMAESLCQKRALEAFRLDPAKWGVNVQSLSGSPANFQVYTALLKPHERIMALDLPHGGHLSHGYQTDTKKISAVSIFFETMPYRLNESTGYIDYDQLEKSATLFRPKLIVAGASAYARLYDYAHIRKVCDKQKAILLADMAHISGLVAAGVIPSPFEYADIVTTTTYKSLRGPXGAMIFFKKGVKEVNKQGKEVLYDYEDKINQAVFPGLQSAPHNHTIAGLAVALKQATTPEYKAYQEQVLSNCSKFAETLMKKGYELVSGGTENHLVLVNLKNKGIDGSRVEKVLESVHIVANKNTVPGDVSAMVPSGIRMGRDFVKVAEYFDXAVTVAVKIKAETTGTKLKXFLAXMQSSPHLQXEIAKLRHEGVETLQIFLLPKEVSFTKFRLQKFVTIDHLTANVSTHT

SEQ ID NO: 10595 - DNA, 1533 bp, Triticum monococcum
  CDS (1)..(1533)
atggccatggcgacggcgctccgcaagctctccgcccgcggccagcccctctcccgcctcacgccgctctactccatggcgtccctgccggcgacggaggagagatccgcagtcacctggccgaagcagttgaacgcgccgctggaggaggtcgaccccgagattgccgacatcatcgagctcgagaaggcccgccaatggaaggggctggagctcatcccgtcggagaacttcacctccctgtcggtgatgcaggcggtggggtccgtcatgaccaacaagtacagcgaggggtaccccggcgcgagatactacggtggaaacgaatacatcgatatggccgagacgctgtgccagaaacgtgctttggaggcctttaatttggacccggagaagtggggagtgaatgtgcaacccctatcgggttcacctgccaacttccatgtatacactgctctgctgaagccacatgatagaattatggctctggatcttcctcacggtggacatctttcccatggttaccagactgacacaaagaaaatctcagcagtttcaatattctttgagacaatgccttacagactggatgaaagcactggcttgattgattatgaccagttggagaaaagtgccgttctgtttaggccaaagttgattgttgctggtgctagtgcatatgcccgcctttatgattataaccgcatgcggaagatctgtgacaagcagaaggcagttcttctcgcagacatggcacatatcagtgggctagttgctgctggtgtcattccgtctccttttgagtatgcagatgtggtgactaccactacccacaagtcactccgtggtccacgtggagccatgatctttttccggaagggggtgaaagaaataaacaaacaagggaaggaggttaagtatgattttgaggacaaaatcaatgcagctgtcttcccaggtctgcaaggtggaccccataaccatactattactggcctggccgttgcgcttaagcaggcaactactcaggagtacagagcttatcaagagcaagttatgagtaactctgctagatttgctgagagcttaacttcaaaaggctacgacattgtctctggtgggactgataaccatttagttttggtgaacctcaagaaaaagggaatagatggttcacgagtggagaaggttttagaaaatgtgcatattgcagcaaacaagaacacagttcctggtgatgtttcagctatggtacccggaggcatcaggatgggaacccccgcgcttacatcaagaggatttgttgaggaggacttcgccaaggttgccgacttcttcgattcggcagtgaacttggctttgaaggttaaagctgcagcagcaggtaccaaactgaaggactttgttgccactttgcaatccgacagcaacatccaagctgaaattgcaaagcttcgccacgatgtggaggaatatgcgaaacaattcccaacaattggattcgagaaagagaccatgaagtacaagaactaa

SEQ ID NO: 10596 - protein, 510 aa, Triticum monococcum
MAMATALRKLSARGQPLSRLTPLYSMASLPATEERSAVTWPKQLNAPLEEVDPEIADIIELEKARQWKGLELIPSENFTSLSVMQAVGSVMTNKYSEGYPGARYYGGNEYIDMAETLCQKRALEAFNLDPEKWGVNVQPLSGSPANFHVYTALLKPHDRIMALDLPHGGHLSHGYQTDTKKISAVSIFFETMPYRLDESTGLIDYDQLEKSAVLFRPKLIVAGASAYARLYDYNRMRKICDKQKAVLLADMAHISGLVAAGVIPSPFEYADVVTTTTHKSLRGPRGAMIFFRKGVKEINKQGKEVKYDFEDKINAAVFPGLQGGPHNHTITGLAVALKQATTQEYRAYQEQVMSNSARFAESLTSKGYDIVSGGTDNHLVLVNLKKKGIDGSRVEKVLENVHIAANKNTVPGDVSAMVPGGIRMGTPALTSRGFVEEDFAKVADFFDSAVNLALKVKAAAAGTKLKDFVATLQSDSNIQAEIAKLRHDVEEYAKQFPTIGFEKETMKYKN

SEQ ID NO: 10597 - DNA, 1560 bp, Picea sitchensis
  CDS (1)..(1560)
atggcgatgagaacagttgctgcttttgcgacgagggtttccacacgtgatgtgttcaaatcctctgtcactcaatttgctcaacgatactcctctgaggcggcttactctcgaactgaaaaagaaaaatcacatgtcacgtggccaaagcaattgaatgcaccattgcacgaggtggatcctgagattacagacatagttgagctagagaagaataggcaatggaagggacttgaacttattccttcagaaaacttcacctcattatcagttatgcaggctgtagggtcagttatgaccaataagtacagtgaaggctatcctggtgcaagatactatggaggaaatgagtttattgatatggcagagtctttatgtcagaaaagagccttggaagcatttcgtctggatccaaagaaatggggagttaatgtacaacctttatcaggatctcccgcaaattttcatgtgtatacagctttgttgaagccacatgatcgaatcatggcacttgatctcccacatggtggtcatttatcgcatggttaccagacagataccaaaaagatttcagcagtctcggcatactttgagacaatgccatatagattgaatgaatcaactggtattatcgattatgaccagctggagaagagcgcaacccttttcagacccaaactcatcattgcaggtgctagtgcttatgcacgccattatgactatgctaggatgcgcaagatttgtgacaagcaaaaagctgtgctgctggcggatatggctcatataagtggactggtagcaggtggtgttgttccgtctccttttgattttgcagatgtagtgacaacaactacacacaagtcactacgtggtccacgtggtgcaatgatcttttacaggaagggtctcaaggaagttaacaagcaaggtcaagaagttatatatgattacgaggacaagattaatgcagctgtattcccaggtcttcaaggtggtccgcataatcatactataacagggttggctgttgcactcaaacaggctgctactcctgaatttaaatcgtatcaagagcaagttctcagcaactgtgctcattttgcacattgccttatcaaaagagggtatgaacttgtttctggtgggacagacaatcatttggtcctggtaaatttgaagaataagggaattgatggttccagggttgaaagagtgttggaactggctcacatagcagctaataaaaacacagttcctggagatgtttcggcaatgattcctggcggaattcgcatgggaacccccgctctgacctcaagaggtttccttgaggatgattttgcaaaagttgcggagttctttgatcttgcagttcaattaagtatcaaaatcaaatctgaaacaaaaggtggttcaaagttgaaggacttcaaggccaccattgaaagcagtccagccatacaagatgagataagaaatcttcgacatgaagttgaggagtatgcaaagcagtttccaacaattggatttgaaaaatcatccatgaaatataaggaatga

SEQ ID NO: 10598 - protein, 519 aa, Picea sitchensis
MAMRTVAAFATRVSTRDVFKSSVTQFAQRYSSEAAYSRTEKEKSHVTWPKQLNAPLHEVDPEITDIVELEKNRQWKGLELIPSENFTSLSVMQAVGSVMTNKYSEGYPGARYYGGNEFIDMAESLCQKRALEAFRLDPKKWGVNVQPLSGSPANFHVYTALLKPHDRIMALDLPHGGHLSHGYQTDTKKISAVSAYFETMPYRLNESTGIIDYDQLEKSATLFRPKLIIAGASAYARHYDYARMRKICDKQKAVLLADMAHISGLVAGGVVPSPFDFADVVTTTTHKSLRGPRGAMIFYRKGLKEVNKQGQEVIYDYEDKINAAVFPGLQGGPHNHTITGLAVALKQAATPEFKSYQEQVLSNCAHFAHCLIKRGYELVSGGTDNHLVLVNLKNKGIDGSRVERVLELAHIAANKNTVPGDVSAMIPGGIRMGTPALTSRGFLEDDFAKVAEFFDLAVQLSIKIKSETKGGSKLKDFKATIESSPAIQDEIRNLRHEVEEYAKQFPTIGFEKSSMKYKE

SEQ ID NO: 10599 - DNA, 1563 bp, Populus jackii
  CDS (1)..(1563)
atggcagtggcaatgaccatggcccttcgccgtctctcctcttcctttgacaagccccttcgccctggtctcttcaaagccacctccctctattatatgtcttctttgccaaacgaagctgtatatgagaaggagaaacctggtgtcagctggccaaagcagctgaatgcacccttagaggctgttgatcctcaggttgctgatattattgagctcgagaaagctaggcaatggaaggggcttgagcttataccctcagagaacttcacttcggtatcagtgatgcaagctgtgggttctgtcatgaccaacaagtacagtgaaggataccctggtgcaagatactatggtggaaacgagtatattgacatggcagaatccttatgtcagaagcgtgctctggaagcatttcgcctggatcctgctaaatggggagtgaacgtgcaatctctatctggatctccagctaattttcaagtctacactgcattgttaaagcctcatgaaagaatcatggcacttgatcttcctcatggaggccatctttctcatggctatcagacagacaccaaaaaaatatctgcagtgtcaatattttttgagacaatgccatacagattgaatgagagcactggctatattgactatgatcagctggagaaaagtgccactcttttcagaccaaaattaatagtagctggtgctagtgcttacgcacgactatatgattatgcacgcattcgcaaggtttgcgacaaacaaaaagctacactgttggcagatatggcacacattagtggattggttgcagctgatgtcatcccgtcaccttttgagtatgcagatatagtgactaccacaactcacaagtcacttcgcgggccacgtggggcaatgattttcttcaggaaggggttaaaagaggttaacaaacaagggaaagaagtgttttatgactacgaggacaaaatcaatcaagctgtctttcctgggcttcaaggtggtccacacaaccacacaattgctggtttagcagttgctttgaaacaggctacaactgtagagtacaaagcgtatcaagagcaagttctaagtaattgtgcaaaatttgcccagagtttagttgagaaaggctacgaacttgtttctggaggaactgagaaccatttagttttggtgaatttgaagaacaagggtatagatggctccagagttgaaaaggtgcttgaatctgttcacattgctgcaaacaaaaacactgttcctggagatgtgtctgccatggttcccggtggcatcaggatgggaacgccggctcttacttctaggggattcgttgaagaggattttgctaaggtggcagatttctttgatgccgctgtgaagttggcagtgaagatcaaggctgaaaccaaagggacgaagttgaaggatttcttggctacgcagtctgctcctcactttcaatctgagatttcaaaactccgtcgtgacgtggaagagtacgctaagcaattcccaacaattggatttgaaaaggaaaccatgaagtacaagaattga

SEQ ID NO: 10600 - protein, 520 aa, Populus jackii
MAVAMTMALRRLSSSFDKPLRPGLFKATSLYYMSSLPNEAVYEKEKPGVSWPKQLNAPLEAVDPQVADIIELEKARQWKGLELIPSENFTSVSVMQAVGSVMTNKYSEGYPGARYYGGNEYIDMAESLCQKRALEAFRLDPAKWGVNVQSLSGSPANFQVYTALLKPHERIMALDLPHGGHLSHGYQTDTKKISAVSIFFETMPYRLNESTGYIDYDQLEKSATLFRPKLIVAGASAYARLYDYARIRKVCDKQKATLLADMAHISGLVAADVIPSPFEYADIVTTTTHKSLRGPRGAMIFFRKGLKEVNKQGKEVFYDYEDKINQAVFPGLQGGPHNHTIAGLAVALKQATTVEYKAYQEQVLSNCAKFAQSLVEKGYELVSGGTENHLVLVNLKNKGIDGSRVEKVLESVHIAANKNTVPGDVSAMVPGGIRMGTPALTSRGFVEEDFAKVADFFDAAVKLAVKIKAETKGTKLKDFLATQSAPHFQSEISKLRRDVEEYAKQFPTIGFEKETMKYKN

SEQ ID NO: 10601 - DNA, 1563 bp, Populus jackii
  CDS (1)..(1563)
atggcaatggcaatagccatggccctgcgcaggctcccctcttcctttgacaagccccttcgccccgctctcttcaaagccacctccctctattatatgtcttccttgccggatgaagctgtatacgagaaggagaaacctggtgtcacttggccaaagcagctaaatgcacccttagaggttgttgacccacaaattgctgatattattgagctcgagaaagctaggcaatggaaggggcttgagcttataccctcagagaacttcacctccgtatcagtgatgcaagccgtgggttctgtcatgaccaacaagtacagtgaaggatatccaggtgcaagatactacggtggaaacgagtttattgacatggcagaatcattatgtcagaagcgtgctctggaagcatttcgcctggatcctgctaaatggggagtcaacgtgcaatctttatctggatctccatctaattttcaagtctacactgcattgttaaaacctcatgaaagaatcatggcacttgatcttcctcacggaggccatctttctcatggctatcagacagacaccaaaaaaatatctgcagtgtcaatattttttgagacaatgccatacagattgaatgagagcactggctatattgactatgatcagctggagaaaagtgccactcttttcagaccaaaattaatagtagctggtgctagtgcttatgcacgtctatatgattatgcacgcattcgcaaggtttgcgacaaacaaaaagctatactgttggccgatatggcacacattagtggattggttgcagctggtgtcatcccatcgccttttgagtatgcagatgtagtgaccaccacaactcacaagtcacttcgtgggccacgtggggccatgattttcttcaggaaggggctaaaagaggttaacaaacaagggaaagaggtcttttatgactatgaggacaaaatcaatcaagctgtctttcctgggcttcaaggtggtccacacaaccacacaattgctggtttagcagttgctttgaaacaggctacaactctggagtacaaagcgtatcaagagcaggttcttagtaattgctcaaaatttgctcagagtctagttgagaaaggctatgaacttgtttctggtggaactgagaaccatttagttttggtgaacctgaagaccaagggtattgatggctccagagttgaaaaggtgctcgaatctgttcacattgctgcaaacaaaaacactgttcctggtgatgtgtctgccatggttcctggtggcatcaggatgggaacaccggctcttacttctagggggttcgtggaagaggattttgctaaggtggcagatttctttgatgcttcggtgaagttggcagtgaagatgaaggctgaaaccaaagggacaaagttgaaggatttcttggttacaatgcagtctgctcactttcaatctgagatttcaaaactccgtcatgaagtggaagaatatgctaagcaattcccaacaattggatttaacaaagaaaccatgaagtacaagaattga

SEQ ID NO: 10602 - protein, 520 aa, Populus jackii
MAMAIAMALRRLPSSFDKPLRPALFKATSLYYMSSLPDEAVYEKEKPGVTWPKQLNAPLEVVDPQIADIIELEKARQWKGLELIPSENFTSVSVMQAVGSVMTNKYSEGYPGARYYGGNEFIDMAESLCQKRALEAFRLDPAKWGVNVQSLSGSPSNFQVYTALLKPHERIMALDLPHGGHLSHGYQTDTKKISAVSIFFETMPYRLNESTGYIDYDQLEKSATLFRPKLIVAGASAYARLYDYARIRKVCDKQKAILLADMAHISGLVAAGVIPSPFEYADVVTTTTHKSLRGPRGAMIFFRKGLKEVNKQGKEVFYDYEDKINQAVFPGLQGGPHNHTIAGLAVALKQATTLEYKAYQEQVLSNCSKFAQSLVEKGYELVSGGTENHLVLVNLKTKGIDGSRVEKVLESVHIAANKNTVPGDVSAMVPGGIRMGTPALTSRGFVEEDFAKVADFFDASVKLAVKMKAETKGTKLKDFLVTMQSAHFQSEISKLRHEVEEYAKQFPTIGFNKETMKYKN

SEQ ID NO: 10603 - DNA, 1416 bp, Populus tremuloides
  CDS (1)..(1416)
atggatccagtcactgcatggggaaacacctccctggaatcagtggacccagaaatccacgacttgatcgagaaggaaaaacgccggcaatgcagaggtatcgagctcatcgcttcagaaaatttcacatctttcgccgttatagaggcccttggcagcgctctgactaataagtactcagagggtatgccaggaaaccgctactacggcgggaatgaatatattgatcagattgaaaatctctgcagatctcgggctcttgaagcttttcatttagaccccacaaaatggggtgtaaatgttcagccatattcaggttctcctgcaaattttgctgcttatacagcagttcttcagccccatgacagaatcatggggttggatttgccttctggagggcatttgactcacgggtattacacatctgggggcaagaagatttcagccaccagtatttattttgagagtttgccttacaaggtgaattcgcaaactgggtatattgattatgatagattggaggagaaggctctggattttaggcctaagcttattatttgtggtggaagtgcttatccgagagattgggattataaaaggtttagatctgtcgctgataagtgtggtgctcttttgctttgtgatatggctcacatcagtggccttgtcgctgctcaggaagctgccaacccctttgagtactgtgacatagtcaccaccactacccacaaaagtttgaggggtcctagggctggtatgatcttctatcgcaagggccctaaaccaccaaagaagggtcagccagagaatgcggtttatgacttcgaagacaaggtcaactttgctgttttcccatctcttcagggtggtccccacaatcaccagatcggtgctctggctgttgccctgaaacaggtccaaacccctgggttcaaggcctatgccaagcaagtcaaggcgaatgccgttgcccttggaaaatacttgatgggccagggatacaagcttgttactgaaggaactgagaaccacctcgttctgtgggatcttagaccccttggattgacaggcaacaaggtcgaaaagctctgtgaccttgcaaacatcaccgtcaacaaaaatgccgtgtttggtgacagcagtgctttggctccgggaggagtaagaatcggtacccccgccatgacttcaagaggtttggtagagaaggatttcgaacagattggagagttcctccaccgtgctgtgaccatcacgctgagcatccaaaaggaatatggaaagctcttgaaggacttcaacaagggtctggtgaacaacaaggacattgaggcactcaaggctgatgttgaaaagttttctggttccttcgacatgcctgggtttctgatgtctgagatgaagtacaaggattag

SEQ ID NO: 10604 - protein, 471 aa, Populus tremuloides
MDPVTAWGNTSLESVDPEIHDLIEKEKRRQCRGIELIASENFTSFAVIEALGSALTNKYSEGMPGNRYYGGNEYIDQIENLCRSRALEAFHLDPTKWGVNVQPYSGSPANFAAYTAVLQPHDRIMGLDLPSGGHLTHGYYTSGGKKISATSIYFESLPYKVNSQTGYIDYDRLEEKALDFRPKLIICGGSAYPRDWDYKRFRSVADKCGALLLCDMAHISGLVAAQEAANPFEYCDIVTTTTHKSLRGPRAGMIFYRKGPKPPKKGQPENAVYDFEDKVNFAVFPSLQGGPHNHQIGALAVALKQVQTPGFKAYAKQVKANAVALGKYLMGQGYKLVTEGTENHLVLWDLRPLGLTGNKVEKLCDLANITVNKNAVFGDSSALAPGGVRIGTPAMTSRGLVEKDFEQIGEFLHRAVTITLSIQKEYGKLLKDFNKGLVNNKDIEALKADVEKFSGSFDMPGFLMSEMKYKD

SEQ ID NO: 10605 - DNA, 1551 bp, Populus tremuloides
  CDS (1)..(1551)
atggccattgctcttcgcaggctctcttcctccctcaggaacccaatcaaaccttacctcaatggcggttctctctattacaacatgtcttctttgcctcataaagctctgtccgacgaagacacagctcgcgccaattggataaagcaattgaatgctccgttagaggaaatcgatccggaaattgctgacatcatcgaactcgagaaagcaaggcaatggaagggattggaactcattccttcagagaatttcacgtcggtgtcggtgatgcaagcggttggttcggttatgaccaataaatacagtgaagggtacccgggggctagatattatggaggaaatgagtacattgacatggctgagacgttatgtcagaagcgtgcattagaagcttttgggttggatcctcaaaaatggggagtcaacgtgcagtcactatctggatcccctgctaactttcaagtttacacggcactgctgaaacctcatgagagaatcatggcacttgatctgccacatggtgggcatctttcacatggttatcagactgacacaaagaagatatctgctgtatccatattttttgagacaatgccatacagattgaatgagagtacaggctatgtggactatgatcagctggagaaaagtgccacactctttagaccaaaacttatagttgctggtgcaagtgcttatgctcgcctttatgactatgcacgtatccgtaaggtctgtgacaagcaaaaggcagttttgttggctgatatggcacacatcagtgggcttgttgcagcaggtgttattccatctcctttcgaatatgcagatgtcgttacaaccaccacgcacaagtcacttcgaggtccacggggggctatgatcttcttcaggaagggggtgaaagaaattaacaaacaagggaaagaagtgatgtatgactatgaagacaaaatcaatcaggcagtctttcctggacttcaaggtggtccacacaatcataccatatctggtttagcggttgcactaaagcaggcgagaactccagagtacaaggcctaccaagagcaagttctcagcaactgttcaaaatttgctcagagcttgatagagaagggctatgaactggtatctggtggcactgagaaccatctagtcctggtgaatttaagaaacaagggtattgatggatcaagagttgaaaaggttctggaattagtccacattgcagctaataaaaacactgttcctggagatgtatctgccatggttcctggtggaattcgtatgggaaccccggctctcacttcaaggggttttattgagagagattttgtgaaagtagctgaattcttcgatgctgctgtgaagttggccttgaagatcaaggcagatgcacaaggtacaaagttgaaggattttgtagcagccatgaagtcagatggatatcaatctgagattgcaaggctccgtcatgatgttgaagagtatgcaaagcaattccctacagttggatttgagaaggaaacaatgaaatacaaggactaa

SEQ ID NO: 10606 - protein, 516 aa, Populus tremuloides
MAIALRRLSSSLRNPIKPYLNGGSLYYNMSSLPHKALSDEDTARANWIKQLNAPLEEIDPEIADIIELEKARQWKGLELIPSENFTSVSVMQAVGSVMTNKYSEGYPGARYYGGNEYIDMAETLCQKRALEAFGLDPQKWGVNVQSLSGSPANFQVYTALLKPHERIMALDLPHGGHLSHGYQTDTKKISAVSIFFETMPYRLNESTGYVDYDQLEKSATLFRPKLIVAGASAYARLYDYARIRKVCDKQKAVLLADMAHISGLVAAGVIPSPFEYADVVTTTTHKSLRGPRGAMIFFRKGVKEINKQGKEVMYDYEDKINQAVFPGLQGGPHNHTISGLAVALKQARTPEYKAYQEQVLSNCSKFAQSLIEKGYELVSGGTENHLVLVNLRNKGIDGSRVEKVLELVHIAANKNTVPGDVSAMVPGGIRMGTPALTSRGFIERDFVKVAEFFDAAVKLALKIKADAQGTKLKDFVAAMKSDGYQSEIARLRHDVEEYAKQFPTVGFEKETMKYKD

SEQ ID NO: 10607 - DNA, 1668 bp, Populus tremuloides
  CDS (1)..(1668)
atggatttaacacaagcagcgcaatcaggtctctcgcttcgatttcactcaagttcaattccaattcaactgcaattactcgatcaaaaacaagaaacccacatcgataacgaagaaaaccaaacagaagatgaacaatttagcattttgggtcatcaagtgtgtataaagagaccaagagataacagttctcaatcatcatcttcatcatcgacgacaagttcttccaaacgggttgctatggatccgggtttggagtctcgtcgggccatggttcgggcatggggaaaccaccctcttcccgtcgcggatcctgaaattcatgagattatggagaaagagaagcaaaggcagtttaaaggtattgaattgattgcatctgagaattttgtttgccgtgcagttatggaagctcttggtagtcatttaactaataaatattcggagggattgcctggttccagatacttatacggaaatcaatatattgatcaaattgaattgatttgttggagccgcgcgctggcagcttttggacttgattctgataaatggggtgttaatgtgcagccatattcgtgtacttcagcgaatttttctgttttcactgggcttttattgcctggggataggatcatggggttagactcgccttctggagggcatttaagtcatgggtattatacacctggagggaagaatgtgtcagcttcgtcaattttttttgagagtctgccatataaagtgaatccacaaaccgggtatattgattatgataagatggaggagaaggctatggattttagacctaagatactgatctgtggtgggagttcgtacccgagggagtgggattatgcgaggtttagacaagttgctgataagattggtgctgttttgatgtgtgatatggctcacattagcgggctcgtagcagctaaggaatgtgtaagtccatttgaatattgtgatattgttacctctacaacacacaaaagtcttcgaggtcctagaggggggattattttttataggaaaggcccaaaattgaggaagcagggtatgcttcttagtcatggtgatggtagcagccattatgattttgaagaaaaaataaattttgcagtccatccatcaacacaagggggtcctcacaataatcacatcgctgctcttgccatagccttaaaacaagtggccacaccagagtacaaagcatatatgcaacaggtaaggaaaaatgctcaggcattagcatctgctttgttgaaaagaaaatgcagactcgtgactggtgggactgataaccatttgttgctgtgggatctaactacctggggattaacaggcaagtgttatgagaaggtgtgtgaaatgtgccacatcactctaaataaaagtgccatatttggtgacaatggtgcgatctatcctggaggagtgagaattggtgctcctgctatgacatcaagaggttgcatagaggctgattttgagacgattgctgactttcttcttaaggctgctcagattacgactgttgtgcagagggaacatggaaaaaaggatttcctcaaaggtcttcataacaataaagatattgttgagcttcgaaaccgggttgagatttttgcttctcagtttgccatgccaggatttgacatttga

SEQ ID NO: 10608 - protein, 555 aa, Populus tremuloides
MDLTQAAQSGLSLRFHSSSIPIQLQLLDQKQETHIDNEENQTEDEQFSILGHQVCIKRPRDNSSQSSSSSSTTSSSKRVAMDPGLESRRAMVRAWGNHPLPVADPEIHEIMEKEKQRQFKGIELIASENFVCRAVMEALGSHLTNKYSEGLPGSRYLYGNQYIDQIELICWSRALAAFGLDSDKWGVNVQPYSCTSANFSVFTGLLLPGDRIMGLDSPSGGHLSHGYYTPGGKNVSASSIFFESLPYKVNPQTGYIDYDKMEEKAMDFRPKILICGGSSYPREWDYARFRQVADKIGAVLMCDMAHISGLVAAKECVSPFEYCDIVTSTTHKSLRGPRGGIIFYRKGPKLRKQGMLLSHGDGSSHYDFEEKINFAVHPSTQGGPHNNHIAALAIALKQVATPEYKAYMQQVRKNAQALASALLKRKCRLVTGGTDNHLLLWDLTTWGLTGKCYEKVCEMCHITLNKSAIFGDNGAIYPGGVRIGAPAMTSRGCIEADFETIADFLLKAAQITTVVQREHGKKDFLKGLHNNKDIVELRNRVEIFASQFAMPGFDI

SEQ ID NO: 10609 - DNA, 1416 bp, Populus tremuloides
  CDS (1)..(1416)
atggatccagtaactgtgtggggaaactcctccctccaaacagttgacccagaaatccacgacttaatcgagaaggaaaaacgccgccaatgcagaggaatcgaactaatcgcatcagaaaacttcacttctttcgctgttatagaggctcttggaagcgctctcaccaacaagtactctgagggtatgccaggtaaccgctactacggaggtaatgaatatattgatgagattgaaaatctctgcagagctcgggcccttcaagcttttcatttggaccccactaaatggggtgtaaatgtccagccctattctggttcccctgcaaatttcgctgcgtacacagcagttctccagccccatgacagaatcatgggcttggatttgccttcaggggggcatttgactcatgggtattacacatctgggggtaaaaagatttcagctacaagtatttattttgagagtttgccttacaaggtgaacccgcaaactgggtttcttgattatgataggtgggaagaaaaggctttggattttaggcctaagcttattatttgtggtggaagtgcttatcctagagactgggattataagaagtttagatctgttgctgataagtgtggtgctcttttgctttgtgacatggctcacatcagtggccttgttgctgctcaggaagctgccaacccgtttgagtactgtgacatagtcaccaccactacccacaaaagtttgaggggtcccagggctggtatgattttttaccgcaagggccctaagccacccaagaagggtcagccggaggatgcagtttatgactttgaagacaagatcaactttgcagttttcccatctcttcagggtggtcctcacaaccaccagattggtgccctggctgttgcattgaaacaggcccagagccccgggttcaaggcctatgctaagcaagtcaaggccaatgcagttgcccttggaaactacttgatgagcaagggatacaagcttgttactgaaggcaccgagaaccaccttgttctgtgggatcttaggccccttgggttgacaggcaacaaggttgaaaaactatgcgaccttgcaaacatcactgtgaacaagaatgccgtgtttggtgacagcagtgctttggcacctggtggagtgagaatcggtgcccccgccatgacttctagaggtttggttgagaaggatttcgagcagattggagaattcctccaccgtgctgtgaccatcacactgagcatccaaaaggaacatggaaagctcttgaaggacttcaacaagggtctggtgaacaacaaggaaatcgaggccctcaaggctgatgttgaacagttctcaggctcctttgagatgcctggctttctgatgtctgagatgaagtataaggattag

SEQ ID NO: 10610 - protein, 471 aa, Populus tremuloides
MDPVTVWGNSSLQTVDPEIHDLIEKEKRRQCRGIELIASENFTSFAVIEALGSALTNKYSEGMPGNRYYGGNEYIDEIENLCRARALQAFHLDPTKWGVNVQPYSGSPANFAAYTAVLQPHDRIMGLDLPSGGHLTHGYYTSGGKKISATSIYFESLPYKVNPQTGFLDYDRWEEKALDFRPKLIICGGSAYPRDWDYKKFRSVADKCGALLLCDMAHISGLVAAQEAANPFEYCDIVTTTTHKSLRGPRAGMIFYRKGPKPPKKGQPEDAVYDFEDKINFAVFPSLQGGPHNHQIGALAVALKQAQSPGFKAYAKQVKANAVALGNYLMSKGYKLVTEGTENHLVLWDLRPLGLTGNKVEKLCDLANITVNKNAVFGDSSALAPGGVRIGAPAMTSRGLVEKDFEQIGEFLHRAVTITLSIQKEHGKLLKDFNKGLVNNKEIEALKADVEQFSGSFEMPGFLMSEMKYKD

SEQ ID NO: 10611 - DNA, 1563 bp, Populus tremuloides
  CDS (1)..(1563)
atggcagtggcaatgaccatggcccttcgccgtctctcctcttcctttgacaagccccttcgccctgctctcttcaaagccacctccctctattatatgtcttctttgccaaacgaagctgtgtatgagaaggagaaacctggtgtcagctggccaaagcagctgaatgcacccttagaggctgttgatcctcaggttgctgatattattgagctcgagaaagctaggcaatggaaggggcttgagcttataccctcagagaacttcacttcggtatcagtgatgcaagctgtgggttctgtcatgaccaacaagtacagtgaaggataccctggtgcaagatactatggtggaaacgagtatattgacatggcagaatccttatgtcagaagcgtgctctggaagcatttcgcctggatcctgctcaatggggagtgaacgtgcaatctctatctggatctccagctaattttcaagtctacactgcattgttaaagcctcatgaaagaatcatggcacttgatcttcctcatggaggccatctttctcatggctatcagacagacaccaaaaaaatatctgcagtgtcaatattttttgagacaatgccatacagattgaatgagagcactggctatattgactatgatcagctggagaaaagtgccacgcttttcagaccaaaattaatagtagctggtgctagtgcttacgcacgactatatgattatgctcgcattcgcaaggtttgcgacaaacaaaaagctatactgttggcagatatggcacacattagtggattggttgcagctgatgtcatcccgtcaccttttgagtatgcagatatagtgactaccacaactcacaagtcacttcgcgggccacgtggggcaatgattttcttcaggaaggggttaaaagaggttaacaaacaggggaaagaagtgttttatgactacgaggacaaaatcaatcaagctgtctttcctgggcttcaaggtggtccacacaaccacacaattgctggtttagcagttgctttgaaacaggctacaactgtagagtacaaagcgtatcaagagcaagttcttagtaattgtgcaaaatttgcccagagtttagttgagaaaggctacgaacttgtttctggtggaactgagaaccatttagttttggtgaatttgaagaacaagggtatagatggctccagagttgaaaaggtgcttgaatctgttcacattgctgcaaacaaaaacactgttcctggagatgtgtctgccatggttcctggtggcatcaggatgggaacgccggctcttacttctaggggattcgttgaagaggattttgctaaggtggcagatttctttgatgccgctgtgaaggtggcagtgaagatcaaggctgaaaccaaagggacaaagttgaaggatttcttggctacgcagtctgctcctcactttcaatctgagatttcaaaactccgtcatgacgtggaagagtacgctaagcaattcccaacaattggatttgaaaaggaaaccatgaagtacaagaattga

SEQ ID NO: 10612 - protein, 520 aa, Populus tremuloides
MAVAMTMALRRLSSSFDKPLRPALFKATSLYYMSSLPNEAVYEKEKPGVSWPKQLNAPLEAVDPQVADIIELEKARQWKGLELIPSENFTSVSVMQAVGSVMTNKYSEGYPGARYYGGNEYIDMAESLCQKRALEAFRLDPAQWGVNVQSLSGSPANFQVYTALLKPHERIMALDLPHGGHLSHGYQTDTKKISAVSIFFETMPYRLNESTGYIDYDQLEKSATLFRPKLIVAGASAYARLYDYARIRKVCDKQKAILLADMAHISGLVAADVIPSPFEYADIVTTTTHKSLRGPRGAMIFFRKGLKEVNKQGKEVFYDYEDKINQAVFPGLQGGPHNHTIAGLAVALKQATTVEYKAYQEQVLSNCAKFAQSLVEKGYELVSGGTENHLVLVNLKNKGIDGSRVEKVLESVHIAANKNTVPGDVSAMVPGGIRMGTPALTSRGFVEEDFAKVADFFDAAVKVAVKIKAETKGTKLKDFLATQSAPHFQSEISKLRHDVEEYAKQFPTIGFEKETMKYKN

SEQ ID NO: 10613 - DNA, 1590 bp, Populus tremuloides
  CDS (1)..(1590)
atgcaagccaccagtggagccgcagtgatgggttctttgcaacaacctgttttgtcaaaagggccagcctttccaatgaaaaggagtgttatcattgggtttccatatcaagttaagcttaattcagtgaagccatgcagggcttcttcccttgaaggaagcttggtcactggcagacccccctcttctgtttctgtgcctatccctgaaactggagctgacataagtagcttcaaagattatggacttagtgaagctgatcctgaagtgcttgaaattataaaaaaggaaaaggataggcagttcaaaagccttgaacttattgcatcagagaatttcacatctcgagcagtgatggaagcagttggttcgtgcttaacaaataagtattctgaaggacttcctggtaaaagatactatggtggaaatgagtacattgatgagcttgaaaccctttgtcaaaaaagggctctggcatcatttaacttggatggaaagaagtggggtgttaatgttcaaccattgtctggatcccctgctaattttgaggtttatactgcccttcttaaaccacatgaccgaatcatgggtttggacttgcctcatgggggacacttgtctcatgggttcatgactcctaaaaggcgggtatctgggacatcaatttactttgagtctatgccatatcgacttgatgaatctacaggcctggttgattatgatatgcttgagaaaacagctatcctctttcgaccaaaactcattattgctggtgctagtgcttatcctcgagattttgattaccctcgcatgaggaagattgcagatgctgtcggtgcctttctcatgatggatatggctcatataagtggtcttgttcctgcttctgttgttgccgacccctttgagtactgtgatgttgtgacaactacaacacacaagtccctacgaggtccaagaggtggaatgatctttttcaaaaaggatcctgttctaggagttgacatggaatctgccatcaacaatgctgtttttccaggcttacaaggcggtcctcataatcacacaattggtggactggcagtttgcttgaagcatgcacaatcccctgaatttaaagcttaccagaagcaggtcatctgtaactctagagcacttgcaaaccgaatggttgaattaggatataaactggtttctggtgggagcgacaatcatctcattcttgtagatctgaggccattgggacttgatggggctcgggtggagaaaatccttgacattgcttctatcaccctcaacaagaattctgtgcctggtgataagagcgccctagttcctggtggcattcgcattggatcccctgcgatgactaccagaggatttacagagagagaatttgtagctaccgccgacttgattcatgaaggagtacaaataagtcttgaagctaaaaaatcagtatccggatccaagctccaggatttcttaaagtttgttaaatcccctgatttccctctaacagataaagtatcagatcttcgaagaagagttgaagcacttacaactcagtttccaatcccaggattatga

SEQ ID NO: 10614 - protein, 529 aa, Populus tremuloides
MQATSGAAVMGSLQQPVLSKGPAFPMKRSVIIGFPYQVKLNSVKPCRASSLEGSLVTGRPPSSVSVPIPETGADISSFKDYGLSEADPEVLEIIKKEKDRQFKSLELIASENFTSRAVMEAVGSCLTNKYSEGLPGKRYYGGNEYIDELETLCQKRALASFNLDGKKWGVNVQPLSGSPANFEVYTALLKPHDRIMGLDLPHGGHLSHGFMTPKRRVSGTSIYFESMPYRLDESTGLVDYDMLEKTAILFRPKLIIAGASAYPRDFDYPRMRKIADAVGAFLMMDMAHISGLVPASVVADPFEYCDVVTTTTHKSLRGPRGGMIFFKKDPVLGVDMESAINNAVFPGLQGGPHNHTIGGLAVCLKHAQSPEFKAYQKQVICNSRALANRMVELGYKLVSGGSDNHLILVDLRPLGLDGARVEKILDIASITLNKNSVPGDKSALVPGGIRIGSPAMTTRGFTEREFVATADLIHEGVQISLEAKKSVSGSKLQDFLKFVKSPDFPLTDKVSDLRRRVEALTTQFPIPGL

SEQ ID NO: 10615 - DNA, 1737 bp, Populus tremuloides
  CDS (1)..(1737)
atggactctaaattaaatctagggtttcaccgtacacaaatcgccgacgattcaatctctctccagctcgactgtagcctccgcgacctccccaccgcaaacccggtttcacccgttcctctccaattgctcgagccactgaccgagtctcactactgcaataaccaaaacggcgagaaagaagaagacgacgatgacagagatgtcgaggagtttaggatattagggcactctttgtgtttcaaacgccgaagagagagcgattctttgacgagcaataaaagagaggcatcctcctcttctaatggattggatgttgaagagcgcaggagtcttgtcaaaacatgggggaaccagccgctaagcgcggcggattcggagatttttgagataatggagaaagagaaagagaggcagtttaaagggattgaattgattgcgtcggagaattttgtatgtagagcggtaatggaggctcttggaagtcatttaacgaataagtattcggagggaatgcctgcagcgcgatattatggtgggaatcagtacattgatgagattgaactgctgtgttgtaagagagcactggaggcttttggtttggattctgagagttggggagtaaatgtgcagccgtattcgtgtacttcggctaatttcgctgtgtatactgggttgttgttgccgggggataggattatggggttggacacaccatctggagggaatacgagtcatggctattatacccctcacgggcggaaggtttccggtgcatctattttcttcgagagtttgccttataaggtcaatcctcaaactgggtatattgatttcgataagttagaggagagggcacttgattttaggccaaaaatactcatttgtggtggtagctcgtatccaagggagtggggttatgcgaggttaaggcatatcgcagataagtgtggtgctgtgcttatgtgtgatatggcacagattagtggtcttgttgctgctaaggaatgtctgaacccctttgtttactgtgatattgttacctcaacaacccataaaagtcttcgaggtccaaggggaggcatcattttctacaggaagggtacaaaaccaaggaaaagggggatccatctaggtcaaggagatgagagtgatcaatatgatttcgaggaaaagattaattttgctgtttttccatcactgcaaggtggaccacataataaccacattgctgctcttgccatagcctttaaacaagtggcgacccctgagtacaaggcatacatgcaacaggtgaagaaaaacgcacagtatttagcagctgctttgctgagaagaaaatgcaggcttgtaactggaggcacagataaccatttgctactctgggatctcaggcctttgggattaacaggtaaagcttatgaaaaggtctgcgagttgtgccacatcacagtaaataaaattgctatttttggggagaatggaactattactcctggaggtgtaaggattggtactcctgccatgacttcaagaggttgcctggaatctgattttgagacaattgctgattttctcctgaaagctgcacatattgcttgtatggtgctgcgtgaacatgggaagctgcagaaggctttcatgaatggtctgcaaaccaagaaagaaattttagagctccagaagcaagttgaaaattttgcaactcagtttgcaatgccaggttttgacatgtga

SEQ ID NO: 10616 - protein, 578 aa, Populus tremuloides
MDSKLNLGFHRTQIADDSISLQLDCSLRDLPTANPVSPVPLQLLEPLTESHYCNNQNGEKEEDDDDRDVEEFRILGHSLCFKRRRESDSLTSNKREASSSSNGLDVEERRSLVKTWGNQPLSAADSEIFEIMEKEKERQFKGIELIASENFVCRAVMEALGSHLTNKYSEGMPAARYYGGNQYIDEIELLCCKRALEAFGLDSESWGVNVQPYSCTSANFAVYTGLLLPGDRIMGLDTPSGGNTSHGYYTPHGRKVSGASIFFESLPYKVNPQTGYIDFDKLEERALDFRPKILICGGSSYPREWGYARLRHIADKCGAVLMCDMAQISGLVAAKECLNPFVYCDIVTSTTHKSLRGPRGGIIFYRKGTKPRKRGIHLGQGDESDQYDFEEKINFAVFPSLQGGPHNNHIAALAIAFKQVATPEYKAYMQQVKKNAQYLAAALLRRKCRLVTGGTDNHLLLWDLRPLGLTGKAYEKVCELCHITVNKIAIFGENGTITPGGVRIGTPAMTSRGCLESDFETIADFLLKAAHIACMVLREHGKLQKAFMNGLQTKKEILELQKQVENFATQFAMPGFDM

SEQ ID NO: 10617 - DNA, 1557 bp, Medicago truncatula
  CDS (1)..(1557)
atggcaatggcaatggctcttcgtaggctttcttcttccatcaacaaatcttcacgtcctctcttcagtgcttcttctgtttactacaagtcatctttgcctgatgaagctgtgtatgataaagagaattcacgtgtttcgtggccaaagcaattgaattcttcacttgaggaaattgaccctgaaattgctgatattattgagcttgagaaagctagacaatggaaggggctggaactgattccatcagaaaacttcacttctttatctgttatgcaagctgttggctctatcatgacaaacaaatacagtgaaggttatcccggagcaagatattacggaggaaatgagtatattgacatggcagaaacactatgccaaaagcgtgccttggaagcatttcggttggatccagctaaatggggagtgaacgtgcagcctttgtctggttcaccttcaaattttcatgtttacactgcattgttgaaacctcatgacagaatcatggcacttgatctccctcatggaggacatctttctcatggttaccagaccgacaccaaaaagatatctgcagtctctatattttttgagacaatgccatatagattggatgaaagcacaggatacattgattatgaccagctagagaaatctgctaccctcttcaggccaaaactaattgttgccggtgctagtgcctatgcacgtctgtatgattatgcacgcattcgcaaggtgtgcgataaacaaaaagctgtgatgttagcagatatggcacatatcagtggactggttgcagctggtgttatcccttcaccttttgattatgcagatgtagtgactaccacaactcacaagtcacttcgtggaccacgtggagctatgatctttttccggaagggattaaaagaagtcaacaaacaaggaaaagaggtgttctatgactatgaggataaaatcaatcaagctgtcttccctggactgcaaggtggtcctcacaaccataccatcactggtttagccgttgcattgaaacaggctacaactccagagtataaagcataccaagagcaggttctcagcaattgcgcaaaatttgcacaggctttgagtgagaaaggctatgagcttgtttctggtgggactgagaatcatctagttttggtgaatcttaagaacaagggtattgatggctccagagttgagaaggtgttggaagcagtacatattgcagctaataaaaacactgttccaggagatgtgtctgctatggttcctggtggtatcaggatgggaactcctgctcttacttcaaggggatttgttgaggaggatttcgttaaggtagcagagtattttgatgcatccgtgaatttggctttgaagatcaaggcagagagcaaaggaacaaaattaaaggacttcgtagaaacattgcagtcatcctcctacgtgcagtcagagatctccaaacttcgtcatgatgttgaggagtttgcaaaacaatttccaaccattggttttgaaaaatcaagcatgaagtacaacaaataa

SEQ ID NO: 10618 - protein, 518 aa, Medicago truncatula
MAMAMALRRLSSSINKSSRPLFSASSVYYKSSLPDEAVYDKENSRVSWPKQLNSSLEEIDPEIADIIELEKARQWKGLELIPSENFTSLSVMQAVGSIMTNKYSEGYPGARYYGGNEYIDMAETLCQKRALEAFRLDPAKWGVNVQPLSGSPSNFHVYTALLKPHDRIMALDLPHGGHLSHGYQTDTKKISAVSIFFETMPYRLDESTGYIDYDQLEKSATLFRPKLIVAGASAYARLYDYARIRKVCDKQKAVMLADMAHISGLVAAGVIPSPFDYADVVTTTTHKSLRGPRGAMIFFRKGLKEVNKQGKEVFYDYEDKINQAVFPGLQGGPHNHTITGLAVALKQATTPEYKAYQEQVLSNCAKFAQALSEKGYELVSGGTENHLVLVNLKNKGIDGSRVEKVLEAVHIAANKNTVPGDVSAMVPGGIRMGTPALTSRGFVEEDFVKVAEYFDASVNLALKIKAESKGTKLKDFVETLQSSSYVQSEISKLRHDVEEFAKQFPTIGFEKSSMKYNK

SEQ ID NO: 10619 - DNA, 1245 bp, Herbaspirillum seropedicae
  CDS (1)..(1245): transl_table=11
atgtttgacaagaaccagactctcgcgaaagtcgatcccgacctgtggtctgccatccagaaggaaaacgcacgccagcaggatcacatcgagctgatcgcttctgaaaactacacctcgccggccgtcatggaagcgcaaggttcgcaactgaccaacaagtacgccgaaggctatccgggcaagcgctactacggcggctgcgaatacgtggacgtggccgagcaactggccatcgaccgcttgaaggccctgttcggcgccgaagccgccaacgtgcagccgaactccggctcccaggccaaccagggcgtgttcttcgccatgttgaagccgggcgacaccatcatgggcatgtcgctggcagaaggcggccacctgacccacggcatggcgctgaacatgtcgggcaagtggttcaacgtggtttcctatggcctgaacgacaaggaagagatcgactacgaggccatggagcgcctggcccgtgagaagaagcccaagctgatcatcgctggcgcctcggcttactcgctgcgcatcgacttcgagcgcttcgccaagatcgccaaggaagtcggcgcctacttcatggtcgacatggcccactacgccggcctgatcgccgctggcgtctatccgaacccggtgcccttcgccgacttcgtcacctcgaccacccacaagtccctgcgcggcccgcgcggtggtgtgatcctgatgaaggccgagcacgagaaggccatcaactcggccatcttcccgggtatccagtgtggtccgctgatgcacgtcatcgcggccaaggccgtggccttcaaggaagcggcttcgccggaattcaaggcctatcagcagcaagtggtgaagaacgccgacgtgctggccaagaccctgatcaagcgcggcctgcgcatcgtctccggcggcaccgagtcgcacgtgatgctggtggatctgcgcccgaagggcctgaccggcaaggaagccgaagccatcctgggttcggcccacatgacctgcaacaagaatggcatccccaacgatccggaaaagccgttcgtgacctcgggcatccgcctgggcagcccggccatgaccacccgtggtttcaaggaagccgaagccgagaaggtcggtaacttcatcgccgacgtgctggacaacccgcatgacgcggccaccatcgaacgcgtcaaggccgaggtgaagaagctgaccgacgctttcccggtctacggctga

SEQ ID NO: 10620 - protein, 414 aa, Herbaspirillum seropedicae
MFDKNQTLAKVDPDLWSAIQKENARQQDHIELIASENYTSPAVMEAQGSQLTNKYAEGYPGKRYYGGCEYVDVAEQLAIDRLKALFGAEAANVQPNSGSQANQGVFFAMLKPGDTIMGMSLAEGGHLTHGMALNMSGKWFNVVSYGLNDKEEIDYEAMERLAREKKPKLIIAGASAYSLRIDFERFAKIAKEVGAYFMVDMAHYAGLIAAGVYPNPVPFADFVTSTTHKSLRGPRGGVILMKAEHEKAINSAIFPGIQCGPLMHVIAAKAVAFKEAASPEFKAYQQQVVKNADVLAKTLIKRGLRIVSGGTESHVMLVDLRPKGLTGKEAEAILGSAHMTCNKNGIPNDPEKPFVTSGIRLGSPAMTTRGFKEAEAEKVGNFIADVLDNPHDAATIERVKAEVKKLTDAFPVYG

SEQ ID NO: 10621 - DNA, 1416 bp, Zea mays
  CDS (1)..(1416)
atggaccccgtcgccacatgggggctaaccccgctcgcgggcgccgacccggagatctacgacctcctggagcgcgagaagcggcgccagcgtcgcggcatcgagctcatcgcctccgagaacttcacctccttcgccgtcatggaggcgctcggctccgcgctcactaacaagtactccgagggcatgcccggcgcccgctactacggcggcaacgacgtcatcgacgagatcgagaacctctgccggtcacgcgcgctcgctgccttccaccttgacgccgcgtcctggggcgtcaacgtgcagccctactcgggctcccccgccaacttcgccgcctacaccgcgctgctcaacccgcacgaccggatcatggggctcgaccttccctccggcggacacctcactcacgggtactacacggccggcggtaagaagatctccgccacctcgatctactttgagagcctgccgtacaaggtgagcgccgcaacggggtacatcgactacgagaagctcgaggagaaggcacttgacttccgccccaagctcatcatctgcggtggcagtgcgtacccgagggactgggattacgccaagctcagggccgtcgccgacaaggtcggggccctgctgctctgcgacatggcgcacatcagcgggctcgtcgccgcgcaggaagctgcaaatccttttgaatattgtgatgtggttaccacaaccacgcacaagtccctcagagggccaagggctggcatgatcttctacaggaaaggccctaagccccccaagaagggccagcctgagggtgctgtttatgattacgaagacaagatcaactttgcagtgttcccatctctccaaggtggccctcacaaccaccagattgctgcacttgctgttgctctacagcaaactatgtcgcctggcttcaaggcctatgcaaagcaagtgaaggccaatgctgttgcaattggaaactatctcatgagcaagggctacaagatggtgactgatggaactgagaaccaccttgttctctgggatctccgcccccttggcttgactggaaacaaggtcgaaaagctatgtgatctttgccacatcacattgaacaagaatgctgtcttcggtgacagcagtgcattgtctccgggtggtgtccgcattggcgcgccagcaatgacctcgaggggtctactggagaaggatttcgagcagattggggagttcctccaccaggcagtgaccatctgcctgaacatccagaaggagtacggcaagctcctcaaggacttcaacaagggcctggtgaacaacaaggacatcgagaacctcaaggtccaggtggagaagtttgccgactccttcgacatgcctgggttcacgcttgagagcatgaaatacaaggagtag

SEQ ID NO: 10622 - protein, 471 aa, Zea mays
MDPVATWGLTPLAGADPEIYDLLEREKRRQRRGIELIASENFTSFAVMEALGSALTNKYSEGMPGARYYGGNDVIDEIENLCRSRALAAFHLDAASWGVNVQPYSGSPANFAAYTALLNPHDRIMGLDLPSGGHLTHGYYTAGGKKISATSIYFESLPYKVSAATGYIDYEKLEEKALDFRPKLIICGGSAYPRDWDYAKLRAVADKVGALLLCDMAHISGLVAAQEAANPFEYCDVVTTTTHKSLRGPRAGMIFYRKGPKPPKKGQPEGAVYDYEDKINFAVFPSLQGGPHNHQIAALAVALQQTMSPGFKAYAKQVKANAVAIGNYLMSKGYKMVTDGTENHLVLWDLRPLGLTGNKVEKLCDLCHITLNKNAVFGDSSALSPGGVRIGAPAMTSRGLLEKDFEQIGEFLHQAVTICLNIQKEYGKLLKDFNKGLVNNKDIENLKVQVEKFADSFDMPGFTLESMKYKE

SEQ ID NO: 10623 - DNA, 1296 bp, Octadecabacter antarcticus 307
  CDS (1)..(1296): transl_table=11
atgaatgcccgcaccaaagacaccggtttcttcaccgaaagccttgcgacccgtgaccccgaaattgctgcggcgattggtgcggaactgggtcgtcagcgaaaagagatcgaactgatcgcatcagaaaacatcgtctctgccgccgtgatggaagcccaaggcagcgttatgaccaacaaatacgccgaaggttacccgggccgccgctactatggcggatgccaacacgttgatgtcgctgaaaatttagccattgatcgcgccaaaaagttgtttgattgtgaatttgtgaacgtgcagccaaactctggcagtcaagccaatcaaggtgtgtttcaggcgctgatcaagcccggcgataccattctcggcatgtcgctggacgcgggcggccacttgacccacggcgcaaaaccgaaccaatcgggcaagatttacaacgcgatccaatacggggtaaagcaggccgacagcctattagactatgatcaggttcaggcattggcgaccgagcatcgcccgaaactgatcatcgctggcgggtccgccatcccgcgcatcattgatttcaaacgcatgcgcgagattgcggacagcgttgacgcctacctgctggtcgacatggcgcatttcgcgggtatggtcgcgacgggtttgtacccttcaccttttccccacgcccacgttgccacaacgacaacgcacaaaaccctgcgcggcccgcgcggtggcatgatcctgaccaacgacgaagccctcgccaagaaattcaactcagctatcttcccgggcatccaaggcgggccgttgatgcacgttatagcgggcaaggccgtcgcattcgcagaggcgttgcgccccgaattcaaagcctatcaagaacaggtcgtgaagaatgcacaagcgctggcagatcaattgatcaaaggtggcttagacatcgttacaggcggcacagacagccacctggtgctcgtcgatctgcggcccaaaggcgtcaaaggtaatgacaccgaagcagcgctcgaacgcgcccacatcacctgcaacaaaaacggcatcccgttcgaccctgaaaagccgatggtgacatcaggcgtgcgtttgggatcacccgcgggcacaacgcgtggattcaccgagaccgaattccgccaagtcgctgattggattgtcgaagtggtcgacggtttggcgacgaacggtgcggacggcaatgcagaagtcgaggccaaggtgagaacggaagttgaagcgctctgcgataccttcccgatttatcccaacctttga

SEQ ID NO: 10624 - protein, 431 aa, Octadecabacter antarcticus 307
MNARTKDTGFFTESLATRDPEIAAAIGAELGRQRKEIELIASENIVSAAVMEAQGSVMTNKYAEGYPGRRYYGGCQHVDVAENLAIDRAKKLFDCEFVNVQPNSGSQANQGVFQALIKPGDTILGMSLDAGGHLTHGAKPNQSGKIYNAIQYGVKQADSLLDYDQVQALATEHRPKLIIAGGSAIPRIIDFKRMREIADSVDAYLLVDMAHFAGMVATGLYPSPFPHAHVATTTTHKTLRGPRGGMILTNDEALAKKFNSAIFPGIQGGPLMHVIAGKAVAFAEALRPEFKAYQEQVVKNAQALADQLIKGGLDIVTGGTDSHLVLVDLRPKGVKGNDTEAALERAHITCNKNGIPFDPEKPMVTSGVRLGSPAGTTRGFTETEFRQVADWIVEVVDGLATNGADGNAEVEAKVRTEVEALCDTFPIYPNL

SEQ ID NO: 10625 - DNA, 1698 bp, Saccharomyces cerevisiae (strain AWRI1631)
  CDS (1)..(1698)
atgattctctccgttatctgctggttcttagtccactgtctgttctgtcccccttctgtccaagagatagaatataaaaaagactcattatttttttttaggtacttcgcttattggtggtcaatgagaaaaaaaatactaaaagccatcgcctcttggagaagagcaaactatcaaaaatcatcaagccgacatttccacatcgagtctcatagtctttcaatcatgtttcccagagcttctgcattggccaaatgtatggcaactgttcatcgtcgtgggctactcaccagtggtgcacaatcgctagtctccaaaccagtctcggagggagatccagagatgtttgacatcttgcaacaagaacgtcacagacaaaaacactctatcacccttatcccatcagaaaacttcacctcgaaggccgttatggatttgctaggttctgagctccaaaacaagtattctgaaggttatccaggtgaaagatactacggaggtaacgaaatcatcgataagtccgaatccttgtgtcaagcaagagctctggaactgtacggattagaccctgccaagtggggagttaatgttcaaccattaagcggggcacctgccaatttgtatgtttactccgctatcatgaacgttggtgaaagattaatgggattggatttgccagatggtggtcacttgtctcacgggtaccaacttaagtcaggaacgccaatttctttcatttccaaatacttccaaagtatgccataccatgtcgaccacactacggggctaatcgattacgataacttgcaagtattggccaaggcattcagaccaaaggtgatcgtggccggtacttccgcgtactcgagattaatagactacgctagattcaaggaaatttcccaaggatgcggcgcatatttgatgagtgatatggcacacatatccggtttggtggcagccaatgttgtcccatctccatttgaacattccgatatagttaccacaaccactcacaagtccttgagaggcccaagaggtgctatgattttcttcagaaagggtatcaagtctgtcaccaaaaagggcaaggaaatcccatatgagttagaaaagaaaatcaacttctcagttttcccaggacatcaaggtggtcctcacaaccatactatcggtgcaatggcagtggcattaaagcaagcgatgtctccagaattcaaagaataccaacaaaaaattgtcgacaacagcaaatggtttgctcaggaactaaccaagatgggttataagttggtttccggcggtaccgataaccacttgattgttattgacttatccggtactcaggtagacggtgctcgtgtcgagacaattttaagtgccttgaacattgctgctaacaagaacaccatcccaggtgataagagtgctcttttcccctctggtctaagaatcggtactccagcaatgaccacgagaggatttggccgtgaagagttttctcaagtcgcaaagtacattgattctgccgttaagctcgctgaaaatttgaaaactttggaaccaacaacgaaactagatgcaagatcaagactcaatgagttcaagaagttgtgtaatgaatctagtgaagtcgctgctttgtctggcgagatttccaagtgggtcggtcaataccctgtcccaggtgatatctaa

SEQ ID NO: 10626 - protein, 565 aa, Saccharomyces cerevisiae (strain AWRI1631)
MILSVICWFLVHCLFCPPSVQEIEYKKDSLFFFRYFAYWWSMRKKILKAIASWRRANYQKSSSRHFHIESHSLSIMFPRASALAKCMATVHRRGLLTSGAQSLVSKPVSEGDPEMFDILQQERHRQKHSITLIPSENFTSKAVMDLLGSELQNKYSEGYPGERYYGGNEIIDKSESLCQARALELYGLDPAKWGVNVQPLSGAPANLYVYSAIMNVGERLMGLDLPDGGHLSHGYQLKSGTPISFISKYFQSMPYHVDHTTGLIDYDNLQVLAKAFRPKVIVAGTSAYSRLIDYARFKEISQGCGAYLMSDMAHISGLVAANVVPSPFEHSDIVTTTTHKSLRGPRGAMIFFRKGIKSVTKKGKEIPYELEKKINFSVFPGHQGGPHNHTIGAMAVALKQAMSPEFKEYQQKIVDNSKWFAQELTKMGYKLVSGGTDNHLIVIDLSGTQVDGARVETILSALNIAANKNTIPGDKSALFPSGLRIGTPAMTTRGFGREEFSQVAKYIDSAVKLAENLKTLEPTTKLDARSRLNEFKKLCNESSEVAALSGEISKWVGQYPVPGDI

SEQ ID NO: 10627 - DNA, 1416 bp, Zea mays
  CDS (1)..(1416)
atggaccccgtctccacatgggggctaaccccgctcgcgggcgccgacccggagatctacgacctcctggagcgcgagaagcggcgccagcgtcgcggcatcgagctcatcgcctccgagaacttcacctccttcgccgtcatggaggcgctcggctccgcgctcactaacaagtactccgagggcatgcccggcgcccgctactacggcggcaacgacgtcatcgacgagatcgagaacctctgccggtcacgcgcgctcgctgccttccaccttgacgccgcgtcctggggcgtcaacgtgcagccctactcgggctcccccgccaacttcgccgcctacaccgcgctgctcaacccgcacgaccggatcatggggctcgaccttccctccggcggacacctcactcacgggtactacacggccggcggtaagaagatctccgccacctcgatctactttgagagcctgccgtacaaggtgagcgccgcaacggggtacatcgactacgagaagctcgaggagaaggcacttgacttccgccccaagctcatcatctgcggtggcagtgcgtacccgagggactgggattacgccaggctcagggccgtcgccgacaaggtcggggccctgctgctctgcgacatggcgcacatcagcgggctcgtcgccgcgcaggaagctgcaaatccttttgaatattgtgatgtggttaccacaaccacgcacaagtccctcagagggccaagggctggcatgatcttctacaggaaaggccctaagccccccaagaagggccagcctgagggtgctgtttatgattacgaagacaagatcaactttgcagtgttcccatctctccaaggtggccctcacaaccaccagattgctgcacttgctgttgctctacagcaaactatgtcgcctggcttcaaggcctatgcaaagcaagtgaaggccaatgctgttgcaattggaaactatctcatgagcaagggctacaagatggtgactgatggaactgagaaccaccttgttctctgggatctccgcccccttggcttgactggaaacaaggtcgaaaagctatgtgatctttgccacatcacattgaacaagaatgctgtcttcggtgacagcagtgcattgtctccgggtggtgtccgcattggcgcgccagcaatgacctcgaggggtctactggagaaggatttcgagcagattggggagttcctccaccaggcagtgaccatctgcctgaacatccagaaggagtacggcaagctcctcaaggacttcaacaagggcctggtgaacaacaaggacatcgagaacctcaaggtccaggtggagaagtttgccgactccttcgacatgcctgggttcacgcttgagagcatgaaatacaaggagtag

SEQ ID NO: 10628 - protein, 471 aa, Zea mays
MDPVSTWGLTPLAGADPEIYDLLEREKRRQRRGIELIASENFTSFAVMEALGSALTNKYSEGMPGARYYGGNDVIDEIENLCRSRALAAFHLDAASWGVNVQPYSGSPANFAAYTALLNPHDRIMGLDLPSGGHLTHGYYTAGGKKISATSIYFESLPYKVSAATGYIDYEKLEEKALDFRPKLIICGGSAYPRDWDYARLRAVADKVGALLLCDMAHISGLVAAQEAANPFEYCDVVTTTTHKSLRGPRAGMIFYRKGPKPPKKGQPEGAVYDYEDKINFAVFPSLQGGPHNHQIAALAVALQQTMSPGFKAYAKQVKANAVAIGNYLMSKGYKMVTDGTENHLVLWDLRPLGLTGNKVEKLCDLCHITLNKNAVFGDSSALSPGGVRIGAPAMTSRGLLEKDFEQIGEFLHQAVTICLNIQKEYGKLLKDFNKGLVNNKDIENLKVQVEKFADSFDMPGFTLESMKYKE

SEQ ID NO: 10629 - DNA, 1542 bp, Zea mays
  CDS (1)..(1542)
atggccatggcgacggccctccgcaagctctccgccaacgctctgcgccgccagccgctctcccgcatcacgccgctctactacatggcgtcccttccggcgacggaggagagatccggaatcacctggactaagcagttgaacgcgccgctggaagaggtcgaccccgagattgctgacatcatcgagcacgagaaggcccgccaatggaagggtctggagctcatcccgtcggagaatttcacgtcggtgtcagtgatgcaggcagtgggttccgtcatgaccaacaagtacagcgaggggtaccctggcgcaagatactacgggggaaatgagtttattgatatggcagagtccttgtgtcagaaacgtgctttggaggctttccgtttggacccggcgaaatggggagtgaatgtgcaacctctatccggttcgcccgccaacttccatgtatacactgcactcttgaagccacatgaaaggatcatggctttggatcttcctcacggtggacatctttctcatggttaccagactgacactaagaagatatctgcaacttcaatattttttgagacaatgccttacagattggatgaaagcactggattgattgattacgatcagttggagaaaagcgctgttctttttaggccaaagttgatcattgctggtgcaagtgcatatgctcggctatatgattatgaccgtatgcggaagatatgcaacaagcagaaggcaatacttctagcagacatggcacatattagtgggcttgttgcagctggtgttgttccatctccttttgattatgcagatgtagtgactaccactactcacaaatcactccgtgggccacgtggagccatgatcttttacaggaagggagtcaaagaaataaataaacaaggaaaagaggttatgtatgattttgaggacaaaatcaatgctgctgtctttcctggtctgcaaggtgggcctcataaccataccattactggcttggctgttgcgctcaaacaggcaactactccagaatacagagcttaccaagagcaagttatcagtaattgtgctaaatttgcgcagagcctgatttcaaaaggatatgaactcgtctctggtgggactgacaaccatttagttctggtgaatctcaagaataaggggatagatggttcaagggtggagaaggttttagaaagtgtgcatattgcagcaaacaagaacacagttcctggtgatgtttcagctatggtgccaggaggcatcaggatgggaaccccagcccttacgtcgagaggatttgttgaagaagatttcgctaaagttgctgacttcttcgatgcagcagtgaatctggccttgaagattaaggctgcaacgacaggtggaacaaagctgaaggactttgttgccactttgcaatctgatagcatccaagttgagattgcaaagcttcgccatgatgtagaggaatttgcaaaacaattcccaacaattggatttgagaaagagaccatgaaatacaagaactaa

SEQ ID NO: 10630 - protein, 513 aa, Zea mays
MAMATALRKLSANALRRQPLSRITPLYYMASLPATEERSGITWTKQLNAPLEEVDPEIADIIEHEKARQWKGLELIPSENFTSVSVMQAVGSVMTNKYSEGYPGARYYGGNEFIDMAESLCQKRALEAFRLDPAKWGVNVQPLSGSPANFHVYTALLKPHERIMALDLPHGGHLSHGYQTDTKKISATSIFFETMPYRLDESTGLIDYDQLEKSAVLFRPKLIIAGASAYARLYDYDRMRKICNKQKAILLADMAHISGLVAAGVVPSPFDYADVVTTTTHKSLRGPRGAMIFYRKGVKEINKQGKEVMYDFEDKINAAVFPGLQGGPHNHTITGLAVALKQATTPEYRAYQEQVISNCAKFAQSLISKGYELVSGGTDNHLVLVNLKNKGIDGSRVEKVLESVHIAANKNTVPGDVSAMVPGGIRMGTPALTSRGFVEEDFAKVADFFDAAVNLALKIKAATTGGTKLKDFVATLQSDSIQVEIAKLRHDVEEFAKQFPTIGFEKETMKYKN

SEQ ID NO: 10631 - DNA, 1257 bp, Desulfovibrio salexigens DSM 2638
  CDS (1)..(1257): transl_table=11
atgcagcaatatcgaaatcttctccaagcaaatgatcccgacattttcaatgctctttccggcgaggaatcccgccagagagcaggtattgaactgatcccttctgaaaattacacctaccctgaagttctctgtaccctcggcagtgttttcacaaataaatactccgaaggttatcccggcagacgttactacggcggtcaggaatttaccgataccatcgaagacattgcccgcgaaagagcgaagcaggtcttccgttgtgaacatgccaatgtgcagcctctttccggttctcctatgaaccaggctgtatacctcggcctccttgaacccggcgataccattctggccatggatctctcccatggcggacaccttactcacggtgccccggtttccttcatgggcaagcttttcaatttcatccgctacaaaaccgatcctgttgacggcagcatagattttgacgagcttcgtaaaacagcccttgaacacaagccgaaaatgatcctttgcggttacacttcctacccccgcgatctggattacgctgctttcaagaaaattgccgacgaagtaggggccattaccatgaccgatgcttcacactacggcggactcattgcagccgatgtcatccgcaacccctttgacttcggctttgatgtcgttacttccacctcacacaaatccctgcgcggtccccgtggcggaatgattctttgcaagaaggaattcgcgcccaggatcgataaggctgtcttccccggtctgcagggtggaccgcatatgaatagcattgcgggtattgcggttactcttaaaaaagcacttgagccggaattcaaggaatacggcaagcaggtgctggttaacgccaaaacactcgctgatgaactgctcaaatccggtgcatcccttgtcaccggagggactgacaatcacatgatggtgctcgatactgagaagagctacggtattaacggcaaagttgccgaagaactgctcgacgaggttgccattaccaccaacaagcagatcatccccgatgatcccaatccgcccctgaaaccaagcggtatcaggatcggtactcccgccgctacttcccgtggcatgaaggaagccgatatggtcaaactggcgggctggatcaccaccatcctccaaaatcctgaagataagaatctggccgtcaccacccggtcggaaattgaatctttctgttcaaggtttccggttccgggaatctag

SEQ ID NO: 10632 - protein, 418 aa, Desulfovibrio salexigens DSM 2638
MQQYRNLLQANDPDIFNALSGEESRQRAGIELIPSENYTYPEVLCTLGSVFTNKYSEGYPGRRYYGGQEFTDTIEDIARERAKQVFRCEHANVQPLSGSPMNQAVYLGLLEPGDTILAMDLSHGGHLTHGAPVSFMGKLFNFIRYKTDPVDGSIDFDELRKTALEHKPKMILCGYTSYPRDLDYAAFKKIADEVGAITMTDASHYGGLIAADVIRNPFDFGFDVVTSTSHKSLRGPRGGMILCKKEFAPRIDKAVFPGLQGGPHMNSIAGIAVTLKKALEPEFKEYGKQVLVNAKTLADELLKSGASLVTGGTDNHMMVLDTEKSYGINGKVAEELLDEVAITTNKQIIPDDPNPPLKPSGIRIGTPAATSRGMKEADMVKLAGWITTILQNPEDKNLAVTTRSEIESFCSRFPVPGI

SEQ ID NO: 10633 - DNA, 1239 bp, Desulfovibrio salexigens DSM 2638
  CDS (1)..(1239): transl_table=11
atggaagaactgatgatgaaagacccggcagtagcggctgcgatcggacaggaagtaacccgccagatgaccaagcttgaactcatcgcttcggagaactttacctccacagcggtccgtcaggccatgggcagtgtaatgacccacaagtacgcagaaggttaccccggaaaacgttactacggcggttgtgaatatgttgacctcgcagaagacctcgcccgtgaccgtgcaaaagaaattttcggctgcgaatatgtaaacgtacagccccactccggttctcaggcaaacatggctgtctactttgcagcacttaagcccggcgataccgttctcggtatggacctttcccatggtggtcacctgacccacggctccccggttaacttttccggcaagctcttcgacatcaaattctacggtgttgatcccgaaaccaagaccatcaactacgacaatgtccttgagattgccaaagagtgcaaacccaagatgatcattgccggtgcatccgcatacccccgtatcatcgacttcgcccgcttccgccagattgctgacgaagtaggcgcagttctcatggtagacatggctcacatcgcaggtctcatcgcagcaggcgtacacccctcctgcatcgagcacgcacactacacaactaccaccacccacaagaccctgcgcggtccccgcggcggtatgatcctctccaccgaggaaaacggaaaagcactgaactccaatattttccccggtattcagggcggcccgctcatgcacgttatcgctgctaaagcggttgctttcggtgaagcactcaagccttcctatgttgaataccagaagcaggttgttgcaaacgcacaggctctggccaagaacctcatggatgcaggtttcgacctcgtatccggcggtaccgacaaccacctgatgatgctggacctgaccaacaaggacatcaccggtaaagacgccgaacacgctcttgatgaagcaggtatcaccgtcaacaagaacaccatccccttcgaaacccgttccccgttcgttacctccggcgtacgtatcggtaccccggctctgaccacccgcggaatgaaagaagaagaaatggtgaaagtcgcaggctggatcaccgctgccatcgactccgtcggcaacgacaccaagctgaaccagatcagcaaagaagttgctgaattcgcaaaagactacccgctcttcgcatactag

SEQ ID NO: 10634 - protein, 412 aa, Desulfovibrio salexigens DSM 2638
MEELMMKDPAVAAAIGQEVTRQMTKLELIASENFTSTAVRQAMGSVMTHKYAEGYPGKRYYGGCEYVDLAEDLARDRAKEIFGCEYVNVQPHSGSQANMAVYFAALKPGDTVLGMDLSHGGHLTHGSPVNFSGKLFDIKFYGVDPETKTINYDNVLEIAKECKPKMIIAGASAYPRIIDFARFRQIADEVGAVLMVDMAHIAGLIAAGVHPSCIEHAHYTTTTTHKTLRGPRGGMILSTEENGKALNSNIFPGIQGGPLMHVIAAKAVAFGEALKPSYVEYQKQVVANAQALAKNLMDAGFDLVSGGTDNHLMMLDLTNKDITGKDAEHALDEAGITVNKNTIPFETRSPFVTSGVRIGTPALTTRGMKEEEMVKVAGWITAAIDSVGNDTKLNQISKEVAEFAKDYPLFAY

SEQ ID NO: 10635 - DNA, 1413 bp, Picea sitchensis
  CDS (1)..(1413)
atggatcccgtgaacgaatggggcaacacgccactgaaggttgtggacgaggagatcttcgatctgattgagaaggagaagagaaggcaatgcaggggaatcgaactcatagcctctgagaacttcacatccctggcagtcattgaagctctcggaacccccctcacaaacaaatactcagagggcatgcctggcaacagatactacggtgggaacgaattcatagatctcattgagaatctgtgtagatcaagggccctcgaggccttccatctggattccgagaaatggggtgtgaatgtgcagccttactctgggagccctgctaacttcgcggcctacacagcccttctgaacccacatgaccgcattatgggactggacctaccttctggtggccatctcactcacgggtattacacctctggtggtaagaagatttctgctacatctatttacttcgagagtttgccttacaaggtcagtcaggagactgggttcattgactatgacaagctggaggagaaagccttggatttcaggcctaaacttattatatgcggaggcagtgcttatcccagggactgggattatgccaggttccgctccattgctgacaaatgtggtgccatgctcttatgtgacatggctcacatcagtggtcttgttgctgctcaggaagctggaaatccatttgactattgtgatttggttactacaaccactcacaagagtttgagaggtccaagagcagggatgatcttctataggaaaggccccaaacctcctaaaaagggacagccagagggtgccctctatgattacgaggatagagtaaacttttctgtgttcccatctcttcagggaggaccacacaaccaccaaattgcagcattggctgtggctcttaagcaggttatgactcctggttttaaggcctatgccaagcaggtcaaggcaaatgcggttgctgttggtaactacttgatgaacaaaggatacaagcttgttacaagtgggacagaaaatcacttagttctgtgggatctccgtccaattggactgactggaaataaggtggagaaagtgtgtgatctgtgtaacataacaatcaacaagaatgcagtttacggtgacagcagtgctctgtcccctggtggtgttcgtattggtacccctgcaatgacctccagaggtctgaaggaagccgattttgagcagattggagagttcctccaccagtctattaacatcactttgtctattcagaaggaatatgggaagcttctcaaggacttcaacaaagggttggcaggcaacaaggacatggaaaatctgaaagctgaagtcgagaaattctctgctaaatttgacatgcctggctttgatgtagctacaatgaagtaccaataa

SEQ ID NO: 10636 - protein, 470 aa, Picea sitchensis
MDPVNEWGNTPLKVVDEEIFDLIEKEKRRQCRGIELIASENFTSLAVIEALGTPLTNKYSEGMPGNRYYGGNEFIDLIENLCRSRALEAFHLDSEKWGVNVQPYSGSPANFAAYTALLNPHDRIMGLDLPSGGHLTHGYYTSGGKKISATSIYFESLPYKVSQETGFIDYDKLEEKALDFRPKLIICGGSAYPRDWDYARFRSIADKCGAMLLCDMAHISGLVAAQEAGNPFDYCDLVTTTTHKSLRGPRAGMIFYRKGPKPPKKGQPEGALYDYEDRVNFSVFPSLQGGPHNHQIAALAVALKQVMTPGFKAYAKQVKANAVAVGNYLMNKGYKLVTSGTENHLVLWDLRPIGLTGNKVEKVCDLCNITINKNAVYGDSSALSPGGVRIGTPAMTSRGLKEADFEQIGEFLHQSINITLSIQKEYGKLLKDFNKGLAGNKDMENLKAEVEKFSAKFDMPGFDVATMKYQ

SEQ ID NO: 10637 - DNA, 1542 bp, Ricinus communis
  CDS (1)..(1542)
atggcgatggctcttcgaagactctcttcctctatccgaacacctttcttcaatgccaatggttccctctactacatgtcttctttgcctaaccctgcagttgctgataaagagaaagctcctgctgcttggataaagcaattgaattctccattggaggaaaccgatcctgaaattgctgacatcatcgaacttgagaaagctaggcaatggaagggacttgaacttattccatcagagaatttcacctcagtgtcagttatgcaagcagttggttctgttatgactaataaatacagcgaagggtaccctggagcccgatattatggaggcaatgagtacattgacatggctgagaccttgtgccagaagcgtgcgttagaagcttttcagttggatcctgaaaagtggggagtcaacgtgcagtcgctatctggatctcctgctaactttcaagtttacactgcattattaaaacctcatgagagaatcatggcgctggatcttcctcatggtggacatctttcacatggttatcagactgacacaaagaagatatctgcggtttccatattttttgagacaatgccttacagattggatgagaatactggttatattgattatgaacagttggagaaaagtgccacactctttagaccaaaacttatagttgctggtgcaagtgcttatgcacggctatatgactatgcacgcatccgcaaggtttgtgacaagcaaaaagctgttatgttggctgatatggcacacattagtggcttagttgccgcaggtgttatcccatctccttttgaatatgcagatattgtgacaaccacaacgcataaatcacttcgtggtccacgtggagctatgatcttctttaggaagggagtaaaagagatcaacaaaaaaggggaagaagtgaagtatgactttgaagacaaaattaatcaggcagtttttcctggacttcaaggtggtcctcataatcacacgatatctggtttagcagttgctctaaagcaggtcatgactcctgagtacaaggcctaccaagagcaagttctcaaaaactgttcaaagttttctcagagcttactagagaagggctatgaactggtgtctggtggaacagaaaaccatttagtcttggtcaatttgagaaacaaggggattgatggatcaagagttgaaaaggttttggaatcagttcatattgcagctaacaaaaatactgtccctggtgatgtatctgccatggttcctggtgggattcgcatgggaaccccagctctcacatcaagggggtttgttgaggaagattttgcgaaagtagcagagttctttgatgcagctgtaaaattggccttgaagatcaaggcagatactaaaggaacgaagttgaaggattttgtagcaactatgaagtcttcagatattcaatctgggatcgcacagctgcgacatgatgttgaggaatatgcaaagcaattcccaacagttggttttgagaaagaaacaatgaaatacaaggactaa

SEQ ID NO: 10638 - protein, 513 aa, Ricinus communis
MAMALRRLSSSIRTPFFNANGSLYYMSSLPNPAVADKEKAPAAWIKQLNSPLEETDPEIADIIELEKARQWKGLELIPSENFTSVSVMQAVGSVMTNKYSEGYPGARYYGGNEYIDMAETLCQKRALEAFQLDPEKWGVNVQSLSGSPANFQVYTALLKPHERIMALDLPHGGHLSHGYQTDTKKISAVSIFFETMPYRLDENTGYIDYEQLEKSATLFRPKLIVAGASAYARLYDYARIRKVCDKQKAVMLADMAHISGLVAAGVIPSPFEYADIVTTTTHKSLRGPRGAMIFFRKGVKEINKKGEEVKYDFEDKINQAVFPGLQGGPHNHTISGLAVALKQVMTPEYKAYQEQVLKNCSKFSQSLLEKGYELVSGGTENHLVLVNLRNKGIDGSRVEKVLESVHIAANKNTVPGDVSAMVPGGIRMGTPALTSRGFVEEDFAKVAEFFDAAVKLALKIKADTKGTKLKDFVATMKSSDIQSGIAQLRHDVEEYAKQFPTVGFEKETMKYKD

SEQ ID NO: 10639 - DNA, 1773 bp, Ricinus communis
  CDS (1)..(1773)
atggaatcatcagacttatccctagggtttgcatcgaatacgacatcgtcttcgtcttcccgccgtgctcaaattgctgatgactccatctctctccagcttgattctagcttccgtggccctgaccatccacccgtcccactccaaccactaacagagaacattcataattatcatcaaaacggtattttagataggcaaaacgacaattataaagaagaagattatgaagaagaagaagaagaagaaaacgagaaagaagttagaattttagggtattcaatgtgcttgaaaaggcgaagagatagcgaattaccctcatcgacatcaaattcatcatcaaaaagaacaggattagaccttgaagggcggcgaaatttggttaaatcatgggggaatcaaccaattagtgtgttagattctgagatttttgaaatgatggagaaagagagagacaggcaatataaaggaattgaattgatagcgtcagagaattttgtttgtagagcagtaatggaagcattaggtagtcatttaactaataagtattcagaaggagcacccggtttgcgatactatggtgggaatcagtacattgatgaaatagaaatgctttgttggaaaagagcattggacgcttttaatttggattcagagaattggggtgtaaatgtgcagccatattcgtgtacttctgcgaatttcgctgtctttactgggttgctattacctggagataggattatggggttggataatccttctggagggaatacaagtcatggatattatatgcctagtggaaggaaagtgtctgctgcatcgattttctttgagagtttgccttataaagtgaatccacaaactgggtatattgattttgataagctagaggagagagcacttgattttagacctaaaatacttatttgtggtgggagttcgtatccaagggaatgggattatgccagatttaggcaaattgcagataggtgtggcgctgtactgttgtgtgatatggctcagattagtggtcttgttgctgccaaggaatgtgtaaacccctttgattactgtgacattgttacctcaacaactcataaaagtcttcgaggtcctagaggaggtatcattttttataggagaggaatgaagccaagaaaaatgggaatgctagtaggccaaggagatgatagtaattactatgactttgaggaaaagataaactttgctgtctttccatcactgcaaggtggaccacataataaccatattgctgctctcgccatagctttaaaacaagtggctactcctgagtacaaggcatacatgcaacaggtgaagaaaaatgcacaggctttcgcatgcacgctgttgagaagaaaatgcaggctggtaactggaggcacagacaaccacatgctactttgggatctgaggcctttaggattaacagggaaaatttatgagaaggtctgcgagatgtgccacatcactgtaaataaaattgctgtttttggtgacaatggcaccattagtcctggaggagtaaggataggtactcctgctatgacatcaagaggttgcctagaatctgattttgagacaatagctgattttcttctgaaagctgcacgtattgcgaatattttgcagcgtgagcatgggaaggctcttctaaagggtctgcaaagcaataaagatattttagagctccggaatcgagttgaaacttttgcaactcagtttgcaatgcctggttttgacttgtga

SEQ ID NO: 10640 - protein, 590 aa, Ricinus communis
MESSDLSLGFASNTTSSSSSRRAQIADDSISLQLDSSFRGPDHPPVPLQPLTENIHNYHQNGILDRQNDNYKEEDYEEEEEEENEKEVRILGYSMCLKRRRDSELPSSTSNSSSKRTGLDLEGRRNLVKSWGNQPISVLDSEIFEMMEKERDRQYKGIELIASENFVCRAVMEALGSHLTNKYSEGAPGLRYYGGNQYIDEIEMLCWKRALDAFNLDSENWGVNVQPYSCTSANFAVFTGLLLPGDRIMGLDNPSGGNTSHGYYMPSGRKVSAASIFFESLPYKVNPQTGYIDFDKLEERALDFRPKILICGGSSYPREWDYARFRQIADRCGAVLLCDMAQISGLVAAKECVNPFDYCDIVTSTTHKSLRGPRGGIIFYRRGMKPRKMGMLVGQGDDSNYYDFEEKINFAVFPSLQGGPHNNHIAALAIALKQVATPEYKAYMQQVKKNAQAFACTLLRRKCRLVTGGTDNHMLLWDLRPLGLTGKIYEKVCEMCHITVNKIAVFGDNGTISPGGVRIGTPAMTSRGCLESDFETIADFLLKAARIANILQREHGKALLKGLQSNKDILELRNRVETFATQFAMPGFDL

SEQ ID NO: 10641 - DNA, 1476 bp, Micromonas sp. RCC299
  CDS (1)..(1476)
atggcggcggcgtccaacgcggacgcgtacaagtccctcgcctccggggtctcgtggcccgaggcgtgcaacaaatccctcgcggagatggacccggagatggccgacatcatcgaacacgagaaggcgcgccagtggaaaggcctcgagctcatcccgtccgagaacttcaccagccgctccgtcatggaagccgtgggcagcgtcatgacaaacaagtactccgaggggtacccgggcgcgaggtactacggcgggaacgagttcatcgatcaggccgagacgctgtgccagaagagggcgctggaggcgttccgtctggaccccgagaagtggggagtgaacgtccagtccctctccggatcgccctccaacttccaggtgtacaccggcttgctcaacccccacgacaggatcatgggcctcgacctgccccacggcggccacctctcccacgggttccagacggacacgaagaagatctccgcggtgtccatcttcttcgagtccatgccgtacaggctcgacgagtccaccggtttgatcgactacgacgcgtgccagacgctcgccaccgcgtaccgtccgaagctcctcatcgcgggcgcgtctgcgtacagcagactgtacgattacaagcgcatgcgcgaaatcgccgacagcaccggggcgtacctcctggcggacatggcgcacatctccggcctcgtcgccgcggacatgatcccgtcgccgttcgagtattccgacgtggtgaccaccaccacgcacaagtcccttcgcggccctcgcggcgcgatgatcttctaccgcaagggccagaagggcgtcgacaagaagggcgcgccggtcatgtacgaccttgaggacaagatcaacttcagcgtcttccctgggctccagggcggtccccataaccacacgatcgcgggtttggccgtcgcgttgaagcaggcggcgtcgcccgagttcaaggcgtaccagacgcaggtgatgcgcaacatgcacgccatgtccgagaggctcaagagccacggcatcgagctcgtctccggaggtacggacaaccacctcgtgctcgcggacctccgcccgctcggcgtggacggctcgcgcgtcgaacgcgtcctcgagctcgcgcacatcgcgtgcaacaaaaacaccgtaccgggagacaagagcgcgatggtccccggcggcttgcgcttgggcacacccgcgctcacgacgcgcggattcgtcgaggcggatttcgagaaggtggcggactttgtcgtccgcggcatccacatcgcgaaggacctcaagacgaagctcgggccgaagctgaaggatttccgcgacggtttgtctcacgcgcccgagggtaagttcccggagatcgacgcgctcaaggcggaggttgaggcgttcgcggcgacgttccccaccatcgggttcgacaaggctgagggcaagtacactcagtcgctgtga

SEQ ID NO: 10642 - protein, 491 aa, Micromonas sp. RCC299
MAAASNADAYKSLASGVSWPEACNKSLAEMDPEMADIIEHEKARQWKGLELIPSENFTSRSVMEAVGSVMTNKYSEGYPGARYYGGNEFIDQAETLCQKRALEAFRLDPEKWGVNVQSLSGSPSNFQVYTGLLNPHDRIMGLDLPHGGHLSHGFQTDTKKISAVSIFFESMPYRLDESTGLIDYDACQTLATAYRPKLLIAGASAYSRLYDYKRMREIADSTGAYLLADMAHISGLVAADMIPSPFEYSDVVTTTTHKSLRGPRGAMIFYRKGQKGVDKKGAPVMYDLEDKINFSVFPGLQGGPHNHTIAGLAVALKQAASPEFKAYQTQVMRNMHAMSERLKSHGIELVSGGTDNHLVLADLRPLGVDGSRVERVLELAHIACNKNTVPGDKSAMVPGGLRLGTPALTTRGFVEADFEKVADFVVRGIHIAKDLKTKLGPKLKDFRDGLSHAPEGKFPEIDALKAEVEAFAATFPTIGFDKAEGKYTQSL

SEQ ID NO: 10643 - DNA, 1629 bp, Ostreococcus tauri
  CDS (1)..(1629)
atgatttcgacggtgtctctcgcgcccgcgcgcgcgcgcgcgaccgctcggagggatgggcgcgcgacggtgtccgcgcggtcgtccgggtcgatgaaagtcgcgaatccgcgctcgagagcggtcgtcgggagggccaagccgcagccgttcgaggacgtctcggtgcgagagctcgacggcgagctgcacgagatcctgctcaaggagaagcgacgacagaggctcgggttggagctgatcgcgagtgaaaacttcacgagcaaggcggtgatggaggtgaacgggtcgtgcctgacgaataagtattcggagggtttgccgggacagcggtactacggcgggaacgagttcatcgacgaggtggagcgattgtgtcaaaaccgtgcgctgagcacctaccgcctcgatccggcggaatggggggtgaacgtacaagtgctctctggttccccggccaactttgcggtgtacaccgcgcttcttcagccgcacgagcgtatcatgggtctcgacttgccgcacggcggtcacctcacgcacggcttctatacgccgaagaagaagatctccgcgacgtccgtgtacttcgagtcgatgccgtatcgcttgaacgaggccacgggtttggtggattacgacaagctcgaggagaacgcgatgcttttccgaccgaagttgatcatcgctggcgcctcggcgtacgctcgtaactttgattacaagcgcatgcgcgagatttgcgacaaggttggcgcatacctgatgtccgacatggcccatatctccggtctcgtcgccgctcagctcgcggacgatcctttcaagtactctgacattgtcaccacgacgacgcacaagtctcttagaggtccgcgcggcggcatggtcttctacaggaaggaacacgagcaagccgtcaactctgccgtctttccgggtctccaaggcggcccgcacaaccacaccatcggtgccctggctgtggcgctcaagcaagcgcaaactcccgggtttgtcaagtaccaagagcaagtcatcaagaactgcgccgcaatggcaaagcgcttgatggaactcggatacacgctcgtctctggcggtaccgacaaccacttggtgctgtgtgatttgcgtccgaagggcgtggacggtgcgcgcgttgagaagatcctcgacctgtgccacatcacgttgaataagaactccgttcctggcgacacctctgcgctcgtcccgggcggcatccgcatcggatctccggcgatgacgacgcgcggcatgacggaggcggatttcattcgcgtcgccgacctcatcgataagggcgtcaatatcgctatcgatatcaagggtaagaccgaaggcggtaagttgaaggatttcaaggcgtatttagaagccaacgacgtgccggccatcgccgagttgagggctgaggttgaggctttcgccgatgagttccacatgcccggcgggatttcgaaaataatgtatgtgtcgaaaaaacctgaattaattaacatgcgcgttttctcgcgccgtcgctcgtcactccgcgtcgcgcgcgcgcccgggcggcgcggagggacatcatctatccgtttctcgcgagatccgaccgtttaa

SEQ ID NO: 10644 - protein, 542 aa, Ostreococcus tauri
MISTVSLAPARARATARRDGRATVSARSSGSMKVANPRSRAVVGRAKPQPFEDVSVRELDGELHEILLKEKRRQRLGLELIASENFTSKAVMEVNGSCLTNKYSEGLPGQRYYGGNEFIDEVERLCQNRALSTYRLDPAEWGVNVQVLSGSPANFAVYTALLQPHERIMGLDLPHGGHLTHGFYTPKKKISATSVYFESMPYRLNEATGLVDYDKLEENAMLFRPKLIIAGASAYARNFDYKRMREICDKVGAYLMSDMAHISGLVAAQLADDPFKYSDIVTTTTHKSLRGPRGGMVFYRKEHEQAVNSAVFPGLQGGPHNHTIGALAVALKQAQTPGFVKYQEQVIKNCAAMAKRLMELGYTLVSGGTDNHLVLCDLRPKGVDGARVEKILDLCHITLNKNSVPGDTSALVPGGIRIGSPAMTTRGMTEADFIRVADLIDKGVNIAIDIKGKTEGGKLKDFKAYLEANDVPAIAELRAEVEAFADEFHMPGGISKIMYVSKKPELINMRVFSRRRSSLRVARAPGRRGGTSSIRFSRDPTV

SEQ ID NO: 10645 - DNA, 1632 bp, Ostreococcus tauri
  CDS (1)..(1632)
atgcacaccgcgctgacgatcgcgcgacgatgcgcgcgacgcgcggtgacgtccggacggcatctcggccggccgtacgcggcggtgccgcagggcgcgagcggggtgaactcgaacgcggatgcgtacgcggcgattcgcgccgtgaacgcgaacgtgacggtgcggagtcgccggggactgacgatcgtgccgcgacgctcgccgcgctcgcagtggccggagatgattaataagccgctggaggagatcgatccggagatgtgcgagatcatcgagcacgaaaaggctcgacagtggaagggcctcgagctcattccgagcgaaaactttgtctctcgctcggtgatggacgccgtgggttccatcatgaccaacaagtactccgagggttacccgggggcgagatactacggtggtaatgaattcatcgatatggcggaaacgttgtgccaagagcgcgcgctcaaggctttcggtttggacccggcgaagtggggcgtgaacgtgcagtcgttgtccggttccccggccaacttccaggtgtacacggcgctcttgcagccgcacgataagatcatggcgctcgacttgccgcatggcggtcacttgtcccacggctaccaaacggacacgaagaagatcagcgccacgtccatcttcttcacgtcggtgccgtaccgcctcaacgaggaaaccggtttcattgattacgaaatgtgcgaaaagacggcgacgctcgtccgtccgaagttaatcgtcgctggtgcctctgcgtacgcgcaactttacgactacaagaagatgcgtgacatctgcgacaagacgaactccatcttgctcgccgacatggcgcacatctccggcttggtcgccgcgggcgtcgttccgtctccgttcgagtacgccgacgtcgtgaccacgactacgcacaagtccctccgaggtccgcgcggtgccatgatcttctaccgcaagggtgagaagggcaaggacaagaagggtaacgcgatcatgtacgactacgaggacaagatcaactttgccgtcttcccgggtctccaaggcggtccacacaaccacaccatcaccggtctcgcggttgccctcaagcaagcggcgagcccggagttcaaggcttaccaactgcaggtgttgagcaacatgcaagcctgcgcgaagcgcctccaagagcacggcgtcaagctcgtctctggcggcaccgtcaaccacttggctttgcttgacttgcgcccaatgggtgtcgacggctcccgtgttgaacgtgttttagagctcgcgcacatcgcgtgcaacaagaacacggttccgggtgacgtctctgccatggttccgggcggcttgcgcattggtaccccagcgttgacttcccgaggcttcttggagaaggatttcgaaaccgtcgccgacttgatcgtccgaggcatccacatcaccaaaactatcaacgactccgccaagggcaccaagctcaaggatttccgcgaggctttggcctccaaggagtggccggagctcacgcaacttaccaaggacgtcgagaacctcgccacgcgcttcccgaccattggtttcgagaaggcggagggcaagtacacgcaaggcttgtaa

SEQ ID NO: 10646 - protein, 543 aa, Ostreococcus tauri
MHTALTIARRCARRAVTSGRHLGRPYAAVPQGASGVNSNADAYAAIRAVNANVTVRSRRGLTIVPRRSPRSQWPEMINKPLEEIDPEMCEIIEHEKARQWKGLELIPSENFVSRSVMDAVGSIMTNKYSEGYPGARYYGGNEFIDMAETLCQERALKAFGLDPAKWGVNVQSLSGSPANFQVYTALLQPHDKIMALDLPHGGHLSHGYQTDTKKISATSIFFTSVPYRLNEETGFIDYEMCEKTATLVRPKLIVAGASAYAQLYDYKKMRDICDKTNSILLADMAHISGLVAAGVVPSPFEYADVVTTTTHKSLRGPRGAMIFYRKGEKGKDKKGNAIMYDYEDKINFAVFPGLQGGPHNHTITGLAVALKQAASPEFKAYQLQVLSNMQACAKRLQEHGVKLVSGGTVNHLALLDLRPMGVDGSRVERVLELAHIACNKNTVPGDVSAMVPGGLRIGTPALTSRGFLEKDFETVADLIVRGIHITKTINDSAKGTKLKDFREALASKEWPELTQLTKDVENLATRFPTIGFEKAEGKYTQGL

SEQ ID NO: 10647 - DNA, 1479 bp, Ostreococcus tauri
  CDS (1)..(1479)
atgtcgtttccttcctcgcgatcgcgcgcgcggcacttcgcccacacgtcgtctctcgcgtctcaaaacacgcgggcgcgaaagatggaccgcgtcttccccgaggctttgtctccgctcaaggaggccgacagagaggtgtacgacttgattcaaaatgaaaagaagcgacagatcggcggcatcgagctcatcgcgagcgaaaactttaccagcgcgcccgtgatggaggcgctcggctcggcgctcacgaacaagtactcggaggggcttcccggtgcgcggtactacggtgggaacgagatcatcgataaggtggagacgttgtgccaagagagagcgttgcacgcgtatcgcctggacgcgaaggactggggcgtgaacgtgcagccgtacagcggatcgcccgcgaatctggcggtgtacaccgcgcttttacaaccgcacgaccgtatcatgggtttggatctgccgagtggaggacacctgacgcacggatattacacggcgcacgggaagaagatttcggcgacgagcatcttcttcgagtcgttgccgtacaaggtggatccgaagactggtttgatcgattacgaaaagctcgaggagaaggcgatggatttccgaccgaagatgatcatctgcggcgggtcggcgtacgcgagagattgggattacgcgcgattcagggaaatcgcggataagtgcggggcgatgctcatgatggacatggcgcacatctctggtttggtcgctgcggaggaacaggcgcaaccgttcgagtactgcgatatcgtcaccacaactacgcacaagtcccttcgcggtcctcggtcggggatgatcttcttccgtcgaggcgtgaatgcgaaaactggtaaggactacgactacgagtcgcgcataaacatggcggtgttcccgtcgctccagggcggtcctcacaaccaccaaatcggcgctctgtgcgtcgccctcaagtacgcggcgacgccggcattcaaggagtacatcaagcaagtcaaggctaacgccaaggctcttggtgaacgcctcgtcgagaagggatactccctcgtcaccggcggcacggataaccacttggtgctctgggatctgcgcccgctcggcctcaccgggagcaagatggagtacctgtgcgatctcctgcacatcaccctgaacaagaacgcagtgtttggcgacgcgagcgcgctgtccccgggcggtgtacgcattggcgctcccgcgatgacgtctcgcggcttggtggaaaaggatttcgtccaaatcgctgacttcctctcccgcgccgttgatttgtgcttggaggtgcaacagagccacgggaagatgttgaaggactggaaaaagggcttagacggcaatcccaaggtcgcgtcgatgcgcgccgaggttgaggcattctcgtcggcgttcgacatgcccgccttcacgaaggaaagcatcgacatttag

SEQ ID NO: 10648 - protein, 492 aa, Ostreococcus tauri
MSFPSSRSRARHFAHTSSLASQNTRARKMDRVFPEALSPLKEADREVYDLIQNEKKRQIGGIELIASENFTSAPVMEALGSALTNKYSEGLPGARYYGGNEIIDKVETLCQERALHAYRLDAKDWGVNVQPYSGSPANLAVYTALLQPHDRIMGLDLPSGGHLTHGYYTAHGKKISATSIFFESLPYKVDPKTGLIDYEKLEEKAMDFRPKMIICGGSAYARDWDYARFREIADKCGAMLMMDMAHISGLVAAEEQAQPFEYCDIVTTTTHKSLRGPRSGMIFFRRGVNAKTGKDYDYESRINMAVFPSLQGGPHNHQIGALCVALKYAATPAFKEYIKQVKANAKALGERLVEKGYSLVTGGTDNHLVLWDLRPLGLTGSKMEYLCDLLHITLNKNAVFGDASALSPGGVRIGAPAMTSRGLVEKDFVQIADFLSRAVDLCLEVQQSHGKMLKDWKKGLDGNPKVASMRAEVEAFSSAFDMPAFTKESIDI

SEQ ID NO: 10649 - DNA, 1254 bp, Pseudomonas syringae pv. actinidiae
  CDS (1)..(1254): transl_table=11
atgttcagccgtgatttgactatcgccaagtacgacgccgatctgtttgccgccatggagcaagaagctctgcgtcaggaagaacacatcgagctgatcgcctcggaaaactacaccagtccggccgtcatggaagctcaaggctcggtactgaccaacaagtacgctgaaggctacccaggcaagcgttattacggtggctgcgagtacgtcgacgttgtcgagcaactggccatcgaccgtgccaaggagctgttcggcgccgattacgccaacgtccagccacacgccggttcgcaagccaactcggcggtctacctggctctgctgcaaggcggcgacaccattctgggcatgagcctggcccacggcggtcacttgacccacggtgccagcgtttcgtcctcgggcaagctgtacaacgctgttcagtacggcatcgacggcaatggcatgatcgactacgacgaagtcgagcgcctggctgttgaacacaagccaaaaatgatcgttgccgggttctctgcctactcgcagatcctcgacttcccgcgctttcgcgctatcgccgacaaggtcggtgcctacctgttcgtcgatatggcgcacgtagccggtctggttgccgcaggtgtctacccgaacccggtgccgttcgccgacgtcgtcaccaccaccacgcacaagaccctgcgcggtccacgtggcggcctgatcctggcgcgcgccaacgccgacatcgagaaaaagctgaactccgccgtattccctggctcccagggcggcccgctggagcacgtcatcgcagccaaggccatctgcttcaaggaagcgctgcagcctgagttcaagacctaccagcaacaagtggtcaagaacgccaaggcaatggccggtgtgttcatcgagcgcggtttcgacgtagtgtccggaggtactgaaaaccacctgttcctgctctcgctgatcaagcaggacatctccggtaaagacgccgacgccgctctgggtcgcgccttcatcaccgtcaacaaaaactcggtacccaacgacccacgctccccgttcgtcacctccggcctgcgcttcggcaccccggcggtgaccactcgcggcttcaaggaagcagagtgcaaggaactggccggctggatctgcgacatcctggcagacctgaacaacgaagccgtgattgacgctgtgcgcgagaaggtcaaagccatctgcgcgaagctgccggtttacggcgcttga

SEQ ID NO: 10650 - protein, 417 aa, Pseudomonas syringae pv. actinidiae
MFSRDLTIAKYDADLFAAMEQEALRQEEHIELIASENYTSPAVMEAQGSVLTNKYAEGYPGKRYYGGCEYVDVVEQLAIDRAKELFGADYANVQPHAGSQANSAVYLALLQGGDTILGMSLAHGGHLTHGASVSSSGKLYNAVQYGIDGNGMIDYDEVERLAVEHKPKMIVAGFSAYSQILDFPRFRAIADKVGAYLFVDMAHVAGLVAAGVYPNPVPFADVVTTTTHKTLRGPRGGLILARANADIEKKLNSAVFPGSQGGPLEHVIAAKAICFKEALQPEFKTYQQQVVKNAKAMAGVFIERGFDVVSGGTENHLFLLSLIKQDISGKDADAALGRAFITVNKNSVPNDPRSPFVTSGLRFGTPAVTTRGFKEAECKELAGWICDILADLNNEAVIDAVREKVKAICAKLPVYGA

SEQ ID NO: 10651 - DNA, 1476 bp, Burkholderia cenocepacia (strain AU 1054)
  CDS (1)..(1476): transl_table=11
atgactggcgatagaaccctcagggttcaaggtggagcatcccaccgtgaagcgcggggcgccgtttttgccgttcgcctgggcagccgttgtgcgccgtcgcgtgcatcgccggtggctgtcctgcctcgcgtcatacggattcttccgccacgtcgggctggtctcgccagcagcgcaccgtactcggccactccggtcaacctgtacacacttaacggaaaccgtatgtttgacagagcccaaagcaccatcgcgaacgtcgatcccgaaatctttgcagcgatcgagcaggaaaaccgccgccaggaagatcacatcgagctgatcgcgtcggaaaactacacgagcccggccgtgatggccgcgcagggctcgcagctcacgaacaagtacgcggaagggtatccgggcaagcgctactacggcggttgcgagtacgtcgacgtggtcgagcaactggcgatcgaccgtgtgaagcagctgttcggtgcggaagcggcgaacgtgcagccgaactcgggttcgcaggcgaaccagggcgtgttcttcgcgatgctcaagccgggcgacacgatcatgggcatgagcctcgcgcacggcggccacctgacgcacggctcgccggtgaacatgtcgggcaagtggttcaacgtggtgagctacggcctgaacgaaaacgaagacatcgactacgaagcggccgagaagctcgcgcaggaacacaagccgaagctgatcgtcgcgggcgcgtcggcgtttgcgctgaagatcgatttcgagcgtctggcgaagatcgcgaagtcggtgggcgcgtacctgatggtcgacatggcgcactacgctggcctgatcgcggcgggcgtgtacccgaacccggtgccgcacgcggatttcgtgacgacgacgacgcacaagagcctgcgcggcccgcgcggcggcgtgatcctgatgaaggccgagtacgagaagccgatcaactcggcgatcttcccgggcatccagggcggcccgctgatgcacgtgatcgcggcgaaggcggtggcgttcaaggaagcgctgtcgccggagttcaaggaatatcagcagaaggtggtcgagaacgcacgcgtgctggccgaaacgctggtcaagcgcgggctgcggatcgtgtcgggccgcaccgaaagccacgtgatgctggtcgacctgcgcgcgaagaacatcacgggcaaggcagcggaagcggcactcggcgcggcgcacatcacggtgaacaagaacgcgatcccgaacgatccggaaaagccgttcgtgacgagcggcgtgcgcctgggttcgccggcgatgacgacgcgtggcttcgggccggcggaagccgagcaggtgggtaacctgatcgccgacgtgctggagaacccggaggacgcagcgacgatcgagcgcgtgcgtgcgcaggtcgccgagctgaccaagcgtttcccggtctatcgctga

SEQ ID NO: 10652 - protein, 491 aa, Burkholderia cenocepacia (strain AU 1054)
MTGDRTLRVQGGASHREARGAVFAVRLGSRCAPSRASPVAVLPRVIRILPPRRAGLASSAPYSATPVNLYTLNGNRMFDRAQSTIANVDPEIFAAIEQENRRQEDHIELIASENYTSPAVMAAQGSQLTNKYAEGYPGKRYYGGCEYVDVVEQLAIDRVKQLFGAEAANVQPNSGSQANQGVFFAMLKPGDTIMGMSLAHGGHLTHGSPVNMSGKWFNVVSYGLNENEDIDYEAAEKLAQEHKPKLIVAGASAFALKIDFERLAKIAKSVGAYLMVDMAHYAGLIAAGVYPNPVPHADFVTTTTHKSLRGPRGGVILMKAEYEKPINSAIFPGIQGGPLMHVIAAKAVAFKEALSPEFKEYQQKVVENARVLAETLVKRGLRIVSGRTESHVMLVDLRAKNITGKAAEAALGAAHITVNKNAIPNDPEKPFVTSGVRLGSPAMTTRGFGPAEAEQVGNLIADVLENPEDAATIERVRAQVAELTKRFPVYR

SEQ ID NO: 10653 - DNA, 1524 bp, Medicago truncatula
  CDS (1)..(1524)
atggccatggcacttcgaagactcacttccaccatcaacaaacctacttctctctatcgcttgtcatcttctctctccgctcaacacactcacaaatctcaccccgattggattaaacaactcaacgatcctcttggtgtagtagatcctgagatcgaagatataatcgaactagaaaaagctcgtcaatggaaggggctagagcttataccatcagaaaattttacgtcgttgtcggtgatgcaagcggttggatcggttatgacgaataaatacagtgaaggttatcctggtgctagatactatggtggaaatgagtacattgacatggctgagactttgtgtcagaagcgtgcattggaaacttttggattggatccaacacaatggggagggttcagtacctcagtttctggtcaactgaaaccttctaacttccaagtttacactgctttattgaaacctcatgagagaattatggcacttgatctcccccatggtgggcatctatcacatggaactgacaccaagaagatatcagctgtatctatattctttgaaacaatgccatacaggttggatgagagcactggttatattgactatgaccagatggagaaaagtgctgcactttttaggccaaaattaatagttgccggtgctagtgcttatgcccgtctttatgattatgcgcgtattcgcaaggtctgtgataaacagaaggcagttatgttggctgatatggcacacatcagtggattagttgctgcaggtgttattccttctccttttgattatgcagatgttgtaacaaccacaacacataagtcacttcgtggaccacgtggggctatgatattcttcaggaagggtctgaaagagataaacaagaaagggcaggaagtgctgtatgactacgaagacaagataaatcaggctgttttccctggacttcaaggtggtccccacaatcacactattacaggcttagcagttgcattgaagcaggctatgacaccggaattcaagaattaccagaaacaagttcttagtaactcctcgacatttgcacagagcttgttagagaaaggctatgaccttgtatcgggtggaactgagaaccatttggtgttggtaaacttaagaaacaagggcattgatggttcaagggttgagaaggtgttagaatcagttcatatagctgccaataaaaacactgttccaggagatgtgtctgcaatggttcctggagggatcagaatgggaactcctgctcttacatctaggggttttgttgaggatgattttaaaaaagtagctgaatactttgacgcggctgtcaaaatagccttacagattaaggaaaattctaaaggcacaaagttgaaggattttgtggaagctatggagtccgattcacaagttcaatctcaaatcgctgatctccgccatgacgtagaaggttatgctaagcagtttcccacaattggttttgagatagagacaatgaagtataacaagtga

SEQ ID NO: 10654 - protein, 507 aa, Medicago truncatula
MAMALRRLTSTINKPTSLYRLSSSLSAQHTHKSHPDWIKQLNDPLGVVDPEIEDIIELEKARQWKGLELIPSENFTSLSVMQAVGSVMTNKYSEGYPGARYYGGNEYIDMAETLCQKRALETFGLDPTQWGGFSTSVSGQLKPSNFQVYTALLKPHERIMALDLPHGGHLSHGTDTKKISAVSIFFETMPYRLDESTGYIDYDQMEKSAALFRPKLIVAGASAYARLYDYARIRKVCDKQKAVMLADMAHISGLVAAGVIPSPFDYADVVTTTTHKSLRGPRGAMIFFRKGLKEINKKGQEVLYDYEDKINQAVFPGLQGGPHNHTITGLAVALKQAMTPEFKNYQKQVLSNSSTFAQSLLEKGYDLVSGGTENHLVLVNLRNKGIDGSRVEKVLESVHIAANKNTVPGDVSAMVPGGIRMGTPALTSRGFVEDDFKKVAEYFDAAVKIALQIKENSKGTKLKDFVEAMESDSQVQSQIADLRHDVEGYAKQFPTIGFEIETMKYNK

SEQ ID NO: 10655 - DNA, 1674 bp, Oryza sativa subsp. japonica
  CDS (1)..(1674)
atgctgatgcgtccggtgtggtgggtgctggggctgatcactgcagataaaaacgccacgcgaatccactacctcccaaaccccgagacccccccgcctccaccaccacccgccgctcgccgctcgcccaccatggccatggcgacggcgctccgcaagctctcctccgacgccctccgccgccagccgctctcccgcatcaccccgctctactacatggcgtccctgccggcgacggaggagagatccggagtcacctggccgaagcagctgaacgcgccgctggaggaggtggatcccgagatcgccgacatcatcgagcacgagaaggcccgccaatggaagggtctggagctcatcccgtcggagaacttcacctcggtgtcagtgatgcaggcggtgggatccgtcatgaccaacaagtacagcgaggggtaccccggcgcgagatactacggtggaaacgaatacattgatatggccgagtcattgtgccagaaacgtgctttggaggccttccgcttggacccagcgaaatggggagtgaatgtgcaacctctatcagggtcacctgccaacttccatgtttacactgccctattgaaaccacatgagagaatcatggctttggatcttcctcatggtggacatctttctcacggctaccagactgatactaagaagatttcagcagtttcgatattctttgagacaatgccctacagattggatgaaagcactggcttgattgattatgatcagatggagaaaagtgccgttctttttaggccaaagttgatcgttgcgggtgcaagtgcatatgcgcgtctttatgactatgaccgcatgcggaaggtttgtgacaagcagaaggcaatacttctagcagatatggcacatatcagtgggcttgtcgcagctggtgttgttccatctccttttgattatgcagatgtagtgactaccactactcacaagtcactccgtggaccacgtggagccatgatcttttacaggaagggggtgaaaggagtaaacaagcaaggcaaagaggttatgtatgactttgaggacaagatcaatgctgctgtcttcccaggtctgcaaggtggaccacataatcataccattactggcttagctgttgcgcttaagcaggcaactactccggagtacagagcttatcaagagcaagttatgagtaactgtgcaaaatttgcacagagcttgacagcaaaaggctacgaacttgtctctggtgggactgacaaccatttagtgttggtaaatctcaagagcaagggcatagatggttcaagagtggagaaggttttagaaaacgtgcacattgcagcaaacaagaacacagttcctggtgatgtttcagctatggtaccaggaggcatcaggatgggaaccccagcactgacctcaagaggatttgttgaggaggactttgctaaggttgctgatttcttcgatgcagcagtgaacttggctttgaaggttaaggctgcagcaggtggaacaaaactgaaggactttgttgccactttgcaatctgatagcaacattcaatccgagattgcaaaacttcgccatgatgtggaggaatatgcaaaacagttccccacaattgggtttgagaaagaaaccatgaagtacaagaactaa

SEQ ID NO: 10656 - protein, 557 aa, Oryza sativa subsp. japonica
MLMRPVWWVLGLITADKNATRIHYLPNPETPPPPPPPAARRSPTMAMATALRKLSSDALRRQPLSRITPLYYMASLPATEERSGVTWPKQLNAPLEEVDPEIADIIEHEKARQWKGLELIPSENFTSVSVMQAVGSVMTNKYSEGYPGARYYGGNEYIDMAESLCQKRALEAFRLDPAKWGVNVQPLSGSPANFHVYTALLKPHERIMALDLPHGGHLSHGYQTDTKKISAVSIFFETMPYRLDESTGLIDYDQMEKSAVLFRPKLIVAGASAYARLYDYDRMRKVCDKQKAILLADMAHISGLVAAGVVPSPFDYADVVTTTTHKSLRGPRGAMIFYRKGVKGVNKQGKEVMYDFEDKINAAVFPGLQGGPHNHTITGLAVALKQATTPEYRAYQEQVMSNCAKFAQSLTAKGYELVSGGTDNHLVLVNLKSKGIDGSRVEKVLENVHIAANKNTVPGDVSAMVPGGIRMGTPALTSRGFVEEDFAKVADFFDAAVNLALKVKAAAGGTKLKDFVATLQSDSNIQSEIAKLRHDVEEYAKQFPTIGFEKETMKYKN

SEQ ID NO: 10657 - DNA, 1281 bp, Bacteroides forsythus
  CDS (1)..(1281): transl_table=11
atgaaacgagacagtgtaatttttgaaattatcgaacgtgaccatcaacgccagttgaaaggtatcgagttgattgcttcggaaaacttcgtgagtgaacaggtgatgcaggccatgggcagttaccttaccaacaagtatgccgaaggatatcccgggaaacgttattacgggggctgcgaagtggtagacgaaagcgagaatctggccatcgaacggctgaaaaagctcttcggggccgaatgggctaacgtgcagccacattctggagcacaggcaaacgcggccgtctttctggcagtcctgaatccgggcgatacgttcttaggcttaaacctctcgcacggagggcatctttcgcacggttcgccggtaaacagctcaggtatcttgtatcgcgccgtcgaatataatgtaaaagaagatacgggacgcgtggattacgaacagatggaagaagtggcattgcgcgagaaaccgaaattaattgtcggaggagcttccgcttattctcgggactgggattatgccagaatgcgtgcgattgccgacaaagtcggcgcattgctgatgatcgatatggcacacccggccggcctgattgctgccggtttactgaacaacccgctgccacacgcccatatcgtcacttcaacgacgcataagaccctgcgcggcccgcgcggtggtgtgattttgctgggcaaggattttgaaaatccatggggcaagaaaacaccgcaaggcgaaatcaaaaccatgtctcagctgctcgattcggcggtattccccggtattcagggtggtccgctcgaacatgtgattgccgccaaagccgtgtcattcggcgaagcgcttgaacccgaatacaagacttatcaaacacaggtaaagaaaaatgcagccgtgatggcacaagcctttatcgataagggctacaaaatcatttcgggcggaacggacaaccacagcatgcttatcgacctgcgtaccaaattccccgagttgacaggtaaggtagctgaaaaagcgctagttgccgccgatattacggtgaacaagaatatggtaccgttcgacagccgttcgccgttccaaacatcgggcatccgtatcggtacgccggccatcaccacacgcggagtaaaagagccgctgatgggtgagattgtcgagatgatcgacaccgtactttccaatcccgaatcggaaacaacgatcgcttccgtgcgcagcaaagtgaatcagacgatgaaagactatccgttgtatgcatggtaa

SEQ ID NO: 10658 - protein, 426 aa, Bacteroides forsythus
MKRDSVIFEIIERDHQRQLKGIELIASENFVSEQVMQAMGSYLTNKYAEGYPGKRYYGGCEVVDESENLAIERLKKLFGAEWANVQPHSGAQANAAVFLAVLNPGDTFLGLNLSHGGHLSHGSPVNSSGILYRAVEYNVKEDTGRVDYEQMEEVALREKPKLIVGGASAYSRDWDYARMRAIADKVGALLMIDMAHPAGLIAAGLLNNPLPHAHIVTSTTHKTLRGPRGGVILLGKDFENPWGKKTPQGEIKTMSQLLDSAVFPGIQGGPLEHVIAAKAVSFGEALEPEYKTYQTQVKKNAAVMAQAFIDKGYKIISGGTDNHSMLIDLRTKFPELTGKVAEKALVAADITVNKNMVPFDSRSPFQTSGIRIGTPAITTRGVKEPLMGEIVEMIDTVLSNPESETTIASVRSKVNQTMKDYPLYAW

SEQ ID NO: 10659 - DNA, 1299 bp, Rhizobium meliloti
  CDS (1)..(1299): transl_table=11
atgctttcacagaccaacgacgctttcttcacccgctctctcgccgacagcgatccggaaatcttcggtgcgatcgagaaggagctgggccgccagcgccatgagatcgagctgatcgcctccgagaacatcgtttcacgggccgtgctcgaggcgcagggctcgatcatgaccaacaaatacgccgagggttacccgggcaagcgctattacggcggctgccaatatgtcgatatcgccgaggcactcgcgatcgagcgcgccaagaagctcttcggcgtcaacttcgcgaacgtgcaaccgaattcgggctcccagatgaaccaggcggtcttcctggcgctgctgcagccgggcgacaccttcatgggcctcgacctcaattccggcggccacctgacccatgggtccccggtgaacatgtcgggcaaatggttcaacgtcgtttcctacggcgtgcgcgaagacgatcaccttctcgacatggacgaagtcgccaggaaggcgcgcgagcagaagccgaaactgatcatcgccggcggaacggcctattcccgcatctgggactggaagcgcttccgcgagatcgccgacgaggtgggcgcgtggctgatggtcgacatggcccacatcgccggtctcgtggccggtggccagcatccgtcgccgttcccgcactgccacgttgcgacgacgaccacgcacaagtccctgcgcggcccccgcggcggcatgatcctcaccaatgacgaggaaatcgccaagaagatcaactccgccgtattccccggtctccagggtgggccgctgatgcacgtgattgccgccaaggccgtcgcgcttggcgaggcgctgcagccctccttcaaggattatgcggcccaggtcgtcaagaacgcccgcacccttgccgaaaccttgaaggccaacggcctggatggacatcgtctcggcggtaccgacacccacctgatgcctggtcgacctgcgcaagaagaatgcgaccggcaagcgtgccgaagctgctctcggccgtgctacgtcacctgcaacaagaacggcattcccttcgaccccgaaaagcccttcgtcacctccggcgtgcgcctcggtgcaccggccggtacgacgcgcggcttcaaggaggcggagttcaaggaggtcggcgaactgatcgtcgaggtgctcgacggtctcaaggccgccaattccgacgagggcaatgccgctgtcgaggctggcgtgcgcgagaaggtgatcaagctcaccgaccgcttcccgatgtacggctatatgtga

SEQ ID NO: 10660 - protein, 432 aa, Rhizobium meliloti
MLSQTNDAFFTRSLADSDPEIFGAIEKELGRQRHEIELIASENIVSRAVLEAQGSIMTNKYAEGYPGKRYYGGCQYVDIAEALAIERAKKLFGVNFANVQPNSGSQMNQAVFLALLQPGDTFMGLDLNSGGHLTHGSPVNMSGKWFNVVSYGVREDDHLLDMDEVARKAREQKPKLIIAGGTAYSRIWDWKRFREIADEVGAWLMVDMAHIAGLVAGGQHPSPFPHCHVATTTTHKSLRGPRGGMILTNDEEIAKKINSAVFPGLQGGPLMHVIAAKAVALGEALQPSFKDYAAQVVKNARTLAETLKANGLDGHRLGGTDTHLMPGRPAQEECDRQACRSCSRPCYVTCNKNGIPFDPEKPFVTSGVRLGAPAGTTRGFKEAEFKEVGELIVEVLDGLKAANSDEGNAAVEAGVREKVIKLTDRFPMYGYM

SEQ ID NO: 10661 - DNA, 1416 bp, Arabidopsis thaliana
  CDS (1)..(1416)
atggaaccagtctcttcatggggtaacacctctctcgtctccgtagatccagagatccacgacctaatcgagaaggagaaacgtcggcaatgtcgaggaatcgaacttatcgcttccgagaatttcacttccttcgccgtcatcgaagctctcggaagtgccttaaccaacaaatactccgaaggtattcctggtaatcgttattacggaggtaacgaattcatcgatgagatcgagaatctttgccgttcacgtgctctcgaagctttccattgtgatccagcagcgtggggcgttaatgttcagccgtattctggatctccggcgaatttcgctgcttacacggctttgcttcagcctcacgatcgtatcatggggcttgatttgccttcaggtggtcatttgactcatggttactatacatctggtggtaagaagacctctgcgacttcgatctactttgagagtcttccgtataaggtgaatttcaccactggttacattgattacgataagcttgaagagaaggcgttggatttcaggcctaagttgcttatctgtggtggtagtgcgtatcctagggattgggattacgctagatttagagctattgctgataaggttggagctcttttgctttgtgacatggctcacatcagtggtctcgttgctgctcaggaagctgcaaacccatttgagtactgtgacgttgtgacaaccacaacccacaagagtttgaggggtccaagggctggtatgattttctacaggaagggtccaaaaccaccaaagaagggtcaacccgagggtgcagtctatgattttgaggacaaaatcaactttgctgtattccctgcgcttcaaggtggtcctcacaatcaccagattggtgctttagctgttgcgttgaagcaggctaatactcctgggttcaaggtctacgcaaaacaagtgaaagccaatgctgttgcccttggaaactacctaatgagcaagggttaccagattgtgaccaatggaactgagaaccaccttgttctctgggatcttcgccctcttggattgaccggaaacaaggttgagaagctctgcgatctgtgcagcattacattgaacaagaacgcagtatttggagacagtagtgctcttgctcctggaggtgtaagaatcggtgcacccgcgatgacatcgagaggattggtggagaaggactttgagcagataggagaattcctgagccgtgcagtgacactgacgttggacatccaaaagacatacggtaagttgttgaaggacttcaacaagggtttggtgaacaacaaagatctcgaccagctcaaggctgacgtcgagaagttctctgcgtcttatgaaatgcctggattcctcatgtctgagatgaagtaccaggattag

SEQ ID NO: 10662 - protein, 471 aa, Arabidopsis thaliana
MEPVSSWGNTSLVSVDPEIHDLIEKEKRRQCRGIELIASENFTSFAVIEALGSALTNKYSEGIPGNRYYGGNEFIDEIENLCRSRALEAFHCDPAAWGVNVQPYSGSPANFAAYTALLQPHDRIMGLDLPSGGHLTHGYYTSGGKKTSATSIYFESLPYKVNFTTGYIDYDKLEEKALDFRPKLLICGGSAYPRDWDYARFRAIADKVGALLLCDMAHISGLVAAQEAANPFEYCDVVTTTTHKSLRGPRAGMIFYRKGPKPPKKGQPEGAVYDFEDKINFAVFPALQGGPHNHQIGALAVALKQANTPGFKVYAKQVKANAVALGNYLMSKGYQIVTNGTENHLVLWDLRPLGLTGNKVEKLCDLCSITLNKNAVFGDSSALAPGGVRIGAPAMTSRGLVEKDFEQIGEFLSRAVTLTLDIQKTYGKLLKDFNKGLVNNKDLDQLKADVEKFSASYEMPGFLMSEMKYQD

SEQ ID NO: 10663 - DNA, 1737 bp, Arabidopsis thaliana
  CDS (1)..(1737)
atgactccaacaccaacaccaagagctccaatcgcagacgattcgattaatctacaagtcgatcaaagtttccgatcattaccaacaactttctctccgattccgttacaattactcgaacaaaaagccgagaagaccaccaccgttgatgagccaaagaaagatggaggaggaggaggagatcaaaaggaagacgagcatttcagaatcttaggtcaccatatgtgtctcaaaaggcaaagagattgtccacttttgttaacgcaatcaaagcatccgaagagaagttccatcggtgattcagatctggaatcgcgacgtgctgctgtacgagcttggggtgatcaaccgattcatttggcggatcctgatattcatgagcttatggagaaagagaagcaacgacaagtaagaggaattgaattgattgcttctgagaatttcgtgtgtagagctgtaatggaagctttaggtagtcatttaacgaataaatactctgaaggtatgcctggagctagatactatactgggaatcaatatattgatcagattgagaatctctgtattgagcgtgctcttactgcgtttggtcttgaatctgataaatggggtgttaatgttcagccttattcttgtacttctgctaacttcgcggtgtataccggacttttattgcccggtgaacggattatggggcttgattcgccttctggtggtcatatgagtcatggttattgtactcctggtgggaagaagatttcggctgcttccatcttctttgagagttttccttataaagtgaatcctcaaactgggtatattgattatgataaggttgaagataaggcgcttgattaccgtcctaagattcttatttgtggtgggagttcttatcctagggattgggattttgcaagggttagacagattgcagataagtgtggagctgttttgatgtgtgatatggctcatattagcggtcttgttgcaactaaggaatgttcaaatccatttgatcactgtgacatagtaacctccactactcacaaaggtctacgtggtcctagaggaggtatcatcttctacaggagaggcccaaagataagaaagcagggccatcactctagccattgtgacacttccacgcattacgatctagaggaaaagatcaactttgctgtttttccatctctacaaggaggtccacacaacaaccatatcgctgctcttgccattgcattgaaacaagtggccactccagagtacaaagcttacatacaacagatgaagaaaaacgcccaagctttagcagcagctcttcttagaagaaaatgcagactggttactggtggtacagacaaccatttgttgctgtgggatctcactcctatgggcttaacagggaaagtctacgagaaagtgtgtgagatgtgccatatcactttaaacaagacggctatattcggggacaatggtacaatatctcctggaggtgtaagaatagggacacccgcaatgacaacccgaggctgtatagagtctgatttcgagacaatggcggattttctgataaaggcggctcagataacaagtgcgttgcagagagagcatggaaagtcacacaaggagtttgtgaaaagtttatgcaccaacaaagacatagctgagcttagaaaccgagtcgaagcatttgctttgcagtatgagatgcctgcttctcttattcgaattgaatga

SEQ ID NO: 10664 - protein, 578 aa, Arabidopsis thaliana
MTPTPTPRAPIADDSINLQVDQSFRSLPTTFSPIPLQLLEQKAEKTTTVDEPKKDGGGGGDQKEDEHFRILGHHMCLKRQRDCPLLLTQSKHPKRSSIGDSDLESRRAAVRAWGDQPIHLADPDIHELMEKEKQRQVRGIELIASENFVCRAVMEALGSHLTNKYSEGMPGARYYTGNQYIDQIENLCIERALTAFGLESDKWGVNVQPYSCTSANFAVYTGLLLPGERIMGLDSPSGGHMSHGYCTPGGKKISAASIFFESFPYKVNPQTGYIDYDKVEDKALDYRPKILICGGSSYPRDWDFARVRQIADKCGAVLMCDMAHISGLVATKECSNPFDHCDIVTSTTHKGLRGPRGGIIFYRRGPKIRKQGHHSSHCDTSTHYDLEEKINFAVFPSLQGGPHNNHIAALAIALKQVATPEYKAYIQQMKKNAQALAAALLRRKCRLVTGGTDNHLLLWDLTPMGLTGKVYEKVCEMCHITLNKTAIFGDNGTISPGGVRIGTPAMTTRGCIESDFETMADFLIKAAQITSALQREHGKSHKEFVKSLCTNKDIAELRNRVEAFALQYEMPASLIRIE

SEQ ID NO: 10665 - DNA, 1554 bp, Arabidopsis thaliana
  CDS (1)..(1554)
atggcgttggctcttcgtagactctcctcttccgttaagaaaccgatctcgcttctctcctctaatggcggttcactccgtttcatgtcgtctttatcaaccgcagctatggcggaatcggagaaatctcgttctagttggattaagcaattgaatgcatctctagatgaaatcgatcctgaagttgcggatattatcgaattagagaaggctagacaatggaagggatttgaacttataccgtcagagaatttcacttctctatctgtgatgcaagccgttggttctgttatgactaataagtatagtgaaggataccctggagctagatactatggaggaaatgagtacattgacatggctgagacattatgtcaaaaacgcgcattagaagcttttcagttagatccttctaaatggggagtcaatgtgcagtctttatcaggatcaccagctaatttccaagtttacactgcattgttgaagcctcatgaaagaatcatggcacttgatttacctcatggtggacatctttctcatggttatcagactgacacgaagaaaatatcggctgtatccatcttttttgagacaatgccatacagattggatgagaacactggttacattgattatgaccagctagaaaagagtgccgtgcttttcagaccgaaacttattgttgcgggtgcaagtgcttatgctcgtctatatgactatgcacgtattcgtaaggtctgtaacaagcaaaaggcagttatgttggctgatatggctcatattagtgggttggttgctgctggcgttattccttctccttttgagtatgcagatgttgttacgactacaactcacaaatcgcttcgcggtcctagaggggctatgatattctttaggaaggggttaaaagagattaacaaacaagggaaagaggtcatgtatgactatgaggacagaattaatcaagctgtttttcctggactgcaaggtggtccacataatcacactataacgggtctagcagttgctctgaagcaggcaagaactcctgagtacaaggcctaccaggatcaagttctccgtaattgctcaaagtttgctgagactttgcttgcgaaaggatatgatttagtgtctggaggcactgataatcatttagttttggtgaatctgaaaaacaagggaatagatggatcaagagtggaaaaagtattagaattagtacatattgcagcaaacaagaatactgttcctggtgatgtttctgccatggttcccggtggcatccatatgggaacaccagccctcacatcaagaggattcattgaggaagattttgcaaaagtggcggagtattttgatttagccgtcaagatagccttaaagatcaaagcagagtctcaaggaacaaagttgaaagactttgtagcaacaatgcaatcaaatgagaaattacagtcagagatgtcaaagctccgtgagatggtagaagaatatgctaagcaattcccaacgattgggttcgagaaagagacgatgagatacaaagagtag

SEQ ID NO: 10666 - protein, 517 aa, Arabidopsis thaliana
MALALRRLSSSVKKPISLLSSNGGSLRFMSSLSTAAMAESEKSRSSWIKQLNASLDEIDPEVADIIELEKARQWKGFELIPSENFTSLSVMQAVGSVMTNKYSEGYPGARYYGGNEYIDMAETLCQKRALEAFQLDPSKWGVNVQSLSGSPANFQVYTALLKPHERIMALDLPHGGHLSHGYQTDTKKISAVSIFFETMPYRLDENTGYIDYDQLEKSAVLFRPKLIVAGASAYARLYDYARIRKVCNKQKAVMLADMAHISGLVAAGVIPSPFEYADVVTTTTHKSLRGPRGAMIFFRKGLKEINKQGKEVMYDYEDRINQAVFPGLQGGPHNHTITGLAVALKQARTPEYKAYQDQVLRNCSKFAETLLAKGYDLVSGGTDNHLVLVNLKNKGIDGSRVEKVLELVHIAANKNTVPGDVSAMVPGGIHMGTPALTSRGFIEEDFAKVAEYFDLAVKIALKIKAESQGTKLKDFVATMQSNEKLQSEMSKLREMVEEYAKQFPTIGFEKETMRYKE

SEQ ID NO: 10667 - DNA, 1416 bp, Arabidopsis thaliana
  CDS (1)..(1416)
atggaaccagtctcttcatggggtaacacctctctcgtctccgtagatccagagatccacgacctaatcgagaaggagaaacgtcggcaatgtcgaggaatcgaacttatcgcttccgagaatttcacttccttcgccgtcatcgaagctctcggaagggccttaaccaacaaatactccgaaggtattcctggtaatcgttattacggaggtaacgaattcatcgatgagatcgagaatctttgccgtccaagagctctcgaagctttccattgtgatccagcagcgtggggcgttaatgttcagccgtattctggatctccggcaaatttcgctgcttacacggctttgcttcagcctcacgatcgtatcatggggcttgatttgccttcaggtggtcatttgactcatggttactatacatctggtggtaagaagatctctgcgacttcgatctactttgagagtcttccgtataaggtgaatttcaccactggttacattgattacgataagcttgaagagaaggcgttggatttcaggcctaagttgcttatctgtggtggtagtgcgtatcctagggattgggattacgctagatttagagctattgctgataaggttggagctcttttgctttgtgacatggctcacatcagtggtctcgttgctgctcaggaagctgcaaacccatttgagtactgtgacgttgtgacaaccacaacccacaagagtttgaggggtccaagggctggtatgattttctacaggaagggtccaaaaccaccaaagaagggtcaacccgagggtgcagtctatgattttgaggacaaaatcaactttgctgtattccctgcgcttcaaggtggtcctcacaatcaccagattggtgctctagctgttgcgttgaagcaggctaatactcctgggttcaaggtctacgcaaaacaagtgaaagccaatgctgttgcccttggaaactacctaatgagcaagggttaccagattgtgaccaatggaactgagaaccaccttgttctctgggatcttcgccctcttggattgaccggaaacaaggttgagaagctctgcgatctgtgcagcattacattgaacaagaacgcagtatttggagacagtagtgctcttgctcctggaggtgtaagaatcggtgcacccgcgatgacatcgagaggattggtggagaaggactttgagcagataggagaattcctgagccgtgcagtgacactgacgttggacatccaaaagacatacggtaagttgttgaaggacttcaacaagggtttggtgaacaacaaagatctcgatcagctcaaggctgatgtcgagaagttctcggcgtcttatgagatgcctggattcctcatgtctgagatgaagtacaaggattag

SEQ ID NO: 10668 - protein, 471 aa, Arabidopsis thaliana
MEPVSSWGNTSLVSVDPEIHDLIEKEKRRQCRGIELIASENFTSFAVIEALGRALTNKYSEGIPGNRYYGGNEFIDEIENLCRPRALEAFHCDPAAWGVNVQPYSGSPANFAAYTALLQPHDRIMGLDLPSGGHLTHGYYTSGGKKISATSIYFESLPYKVNFTTGYIDYDKLEEKALDFRPKLLICGGSAYPRDWDYARFRAIADKVGALLLCDMAHISGLVAAQEAANPFEYCDVVTTTTHKSLRGPRAGMIFYRKGPKPPKKGQPEGAVYDFEDKINFAVFPALQGGPHNHQIGALAVALKQANTPGFKVYAKQVKANAVALGNYLMSKGYQIVTNGTENHLVLWDLRPLGLTGNKVEKLCDLCSITLNKNAVFGDSSALAPGGVRIGAPAMTSRGLVEKDFEQIGEFLSRAVTLTLDIQKTYGKLLKDFNKGLVNNKDLDQLKADVEKFSASYEMPGFLMSEMKYKD

SEQ ID NO: 10669 - DNA, 1389 bp, Arabidopsis thaliana
  CDS (1)..(1389)
atgactgaatatctaggcaaagaaatcccttttgaggactatggtcttggtgaagttgatccagaggtccgaaccatcatcacaaaggagaaagatagacaattcaggagcttggagcttattgcatctgagaatttcacgtctcgagcagttatggaggcggttggctcatgccttaccaacaagtattctgagggactgcctggtaaaagatattatggtggcaatgagtacattgatcagttggagacgctttgccagaaccgggctttggcagccttccgcttagattctacgaaatggggggttaatgttcagccgttatctggttcacctgcaaactttgctgtctacactgcgatacttagccctcatgatcggatcatgggtttggatttacctcacggtggtcatctgtcgcatgggttcatgaccgctaaaaggcgtgtatctggaacttcaatatactttgagtccatgccttatcgacttgatgaatcaacaggcattgttgactacgatatgctcgagaaaactgctacacttttcagaccaaagcttattatcgcaggagctagtgcatacagccgagattttgactatcctcgcatgaggaagatcgcagactcagttggtgcttttctgatgatggatatggctcatatcagtgggcttgtggctgcttctgtggtagctgacccttttgagtattgtgatattgttacaacaacaactcacaagtctttgagaggtccgagaggtggcatgatcttcttcaggaaggatccaattaatggggttgatcttgaatctgccgtgaacaatgctgtcttccctggtttgcagggtggccctcataaccacacaattggaggattagcagtctgcttgaaacacgcacaatcaccggaattcaaggcgtaccagaaaagagttgtgtctaactgtagagctctagctaaccgattggttgaactcgggtttaagctagtttctggtggcagcgataaccacttggttctcgtcgatcttagacccatgggtatggatggtgcgcgggttgagaaaatcttagacatggcatctattactctcaacaagaactctgtccctggggacaaaagtgcgttggtaccagggggaataaggataggatcccccgcgatgacgacaagaggactgtcagagaaagactttgtagtagtggctgacttcatcaaggaaggtgtggagataacaatggaagccaagaaagccgcgccgggttcaaagcttcaagatttcaacaagttcgtgacatctcctgagtttccattgaaagagagagtgaagagtctaaaggagagagtggaaaccttcacatctcgttttcccattcctggcgtttaa

SEQ ID NO: 10670 - protein, 462 aa, Arabidopsis thaliana
MTEYLGKEIPFEDYGLGEVDPEVRTIITKEKDRQFRSLELIASENFTSRAVMEAVGSCLTNKYSEGLPGKRYYGGNEYIDQLETLCQNRALAAFRLDSTKWGVNVQPLSGSPANFAVYTAILSPHDRIMGLDLPHGGHLSHGFMTAKRRVSGTSIYFESMPYRLDESTGIVDYDMLEKTATLFRPKLIIAGASAYSRDFDYPRMRKIADSVGAFLMMDMAHISGLVAASVVADPFEYCDIVTTTTHKSLRGPRGGMIFFRKDPINGVDLESAVNNAVFPGLQGGPHNHTIGGLAVCLKHAQSPEFKAYQKRVVSNCRALANRLVELGFKLVSGGSDNHLVLVDLRPMGMDGARVEKILDMASITLNKNSVPGDKSALVPGGIRIGSPAMTTRGLSEKDFVVVADFIKEGVEITMEAKKAAPGSKLQDFNKFVTSPEFPLKERVKSLKERVETFTSRFPIPGV

SEQ ID NO: 10671 - DNA, 1296 bp, Rhizobium meliloti
  CDS (1)..(1296): transl_table=11
atgctttcacagaccaacgacgctttcttcacccgctctctcgccgacagcgatccggaaatcttcggtgcgatcgagaaggagctgggccgccagcgccatgagatcgagctgatcgcctccgagaacatcgtttcacgggccgtgctcgaggcgcagggctcgatcatgaccaacaaatacgccgagggttacccgggcaagcgctattacggcggctgccaatatgtcgatatcgccgaggcactcgcgatcgagcgcgccaagaagctcttcggcgtcaacttcgcgaacgtgcaaccgaattcgggctcccagatgaaccaggcggtcttcctggcgctgctgcagccgggcgacaccttcatgggcctcgacctcaattccggcggccacctgacccatgggtccccggtgaacatgtcgggcaaatggttcaacgtcgtttcctacggcgtgcgcgaagacgatcaccttctcgacatggacgaagtcgccaggaaggcgcgcgagcagaagccgaaactgatcatcgccggcggaacggcctattcccgcatctgggactggaagcgcttccgcgagatcgccgacgaggtgggcgcgtggctgatggtcgacatggcccacatcgccggtctcgtggccggtggccagcatccgtcgccgttcccgcactgccacgttgcgacgacgaccacgcacaagtccctgcgcggcccccgcggcggcatgatcctcaccaatgacgaggaaatcgccaagaagatcaactccgccgtattccccggtctccagggtgggccgctgatgcacgtgattgccgccaaggccgtcgcgcttggcgaggcgctgcagccctccttcaaggattatgcggcccaggtcgtcaagaacgcccgcacccttgccgaaaccttgaaggccaacggcctggacatcgtctcgggcggtaccgacaaccacctgatgctggtcgacctgcgcaagaagaatgcgaccggcaagcgtgccgaagctgctctcggccgtgcctacgtcacctgcaacaagaacggcattcccttcgaccccgaaaagcccttcgtcacctccggcgtgcgcctcggtgcaccggccggtacgacgcgcggcttcaaggaggcggagttcaaggaggtcggcgaactgatcgtcgaggtgctcgacggtctcaaggccgccaattccgacgagggcaatgccgctgtcgaggctggcgtgcgcgagaaggtgatcaagctcaccgaccgcttcccgatgtacggctatatgtga

SEQ ID NO: 10672 - protein, 431 aa, Rhizobium meliloti
MLSQTNDAFFTRSLADSDPEIFGAIEKELGRQRHEIELIASENIVSRAVLEAQGSIMTNKYAEGYPGKRYYGGCQYVDIAEALAIERAKKLFGVNFANVQPNSGSQMNQAVFLALLQPGDTFMGLDLNSGGHLTHGSPVNMSGKWFNVVSYGVREDDHLLDMDEVARKAREQKPKLIIAGGTAYSRIWDWKRFREIADEVGAWLMVDMAHIAGLVAGGQHPSPFPHCHVATTTTHKSLRGPRGGMILTNDEEIAKKINSAVFPGLQGGPLMHVIAAKAVALGEALQPSFKDYAAQVVKNARTLAETLKANGLDIVSGGTDNHLMLVDLRKKNATGKRAEAALGRAYVTCNKNGIPFDPEKPFVTSGVRLGAPAGTTRGFKEAEFKEVGELIVEVLDGLKAANSDEGNAAVEAGVREKVIKLTDRFPMYGYM

SEQ ID NO: 10673 - DNA, 1269 bp, Rhizobium meliloti
  CDS (1)..(1269): transl_table=11
atgcctggtttattcgaaagacagctcaagcatgattcggtcattgccggagcgatcgcgcgcgagatggggcggcaacgatccgagatcgaactgatcgcgtcggagaacatagtgtcgccagctgttcttgccgcgcaaggctccgtcatgaccaacaaatatgccgagggctatccggggcaccgctattatggtggatgccaatatgtcgatctcgtcgaggccgctgcgatagaacgcgctggaatgctgtttgacgcatcgttcgtcaacgtgcagccgcactccggtgcgcaggccaacggcgccgtcatgctcgccctgttgaagccgggcgacaccttcatgggcctgtcgcttgccgccggtggccatcttacccatggggctcggcccaccatgtcagggaagtggttcaacgccgtccaatatggcgttcgcgagagcgattgcctcattgactacgacgagctcgaagtaaaggccatagcgacgcggccgaagctgatcattaccggcgggtcggcctatccgcgtctgatcgacttcaagcgaattcgggcgatcgcagattctgtcggggcggccatgatggtcgatatggcgcattttgccggtctagtcgctggaggggtgcatcctaacccggttgaaatcgccgacatcgtcaccacgacaacgcacaagacgctgcgcggccctcgcggcggtatgatcctgaccaataatcaggacgtagcgaaaaaggtgaactctgcggtgtttccgggattgcagggcggtccgctgatgcatgtcatagcggcaaaggcggtggcgttgggcgaggcgcttgaagacaacttcaggcaatacgctcgccagatggtggccaatgcccgggcccttgcctcagcgctgaccgaacgaggctacgatatcgtttcgggggggaccgatacgcatttgatcctggttgacctgcgcagcaaaggggtttccggcaaggatgcggaagaagctttggggcgtgccgggctgacctgcaacaagaacggcattcccttcgatccagcgccccccgctgtaacttccggcatccggctcggcacgccagcggccaccagccgcggtttccgcgaagcggagttcaacgaagtcggcgcgttgatcgccaacgtcctcgacgcccttggcaccgagcaaagtggcgaacaggagcgccgcgcgagaatgtcggtccacgatctttgcgcggccttcccgatctactcggcgcggcattga

SEQ ID NO: 10674 - protein, 422 aa, Rhizobium meliloti
MPGLFERQLKHDSVIAGAIAREMGRQRSEIELIASENIVSPAVLAAQGSVMTNKYAEGYPGHRYYGGCQYVDLVEAAAIERAGMLFDASFVNVQPHSGAQANGAVMLALLKPGDTFMGLSLAAGGHLTHGARPTMSGKWFNAVQYGVRESDCLIDYDELEVKAIATRPKLIITGGSAYPRLIDFKRIRAIADSVGAAMMVDMAHFAGLVAGGVHPNPVEIADIVTTTTHKTLRGPRGGMILTNNQDVAKKVNSAVFPGLQGGPLMHVIAAKAVALGEALEDNFRQYARQMVANARALASALTERGYDIVSGGTDTHLILVDLRSKGVSGKDAEEALGRAGLTCNKNGIPFDPAPPAVTSGIRLGTPAATSRGFREAEFNEVGALIANVLDALGTEQSGEQERRARMSVHDLCAAFPIYSARH

SEQ ID NO: 10675 - DNA, 1254 bp, Unknown
  nucleic acid homolog of SEQ ID NO: 9727
  CDS (1)..(1254)
atgtttgccaatatttctattgccgaatttgatccagaattagctcaagcgatcaccaatgaagatgcgcgccaagaagctcatattgagttaattgcttctgaaaactactgctcacctgcagtaatggaagctcaaggttcaaaacttaccaataaatatgcagaaggctacccaggcaaacgctactacggcggttgcgaatacgtagatattattgaacaactggcgattgaccgtgctaaagaactctttggtgcagattatgctaacgttcaaccacacgccggttcacaagcaaactctgcagtttacttagctttacttaacccaggcgacactgtgttaggtatgagcttggcacatggtggtcacttgactcatggtgcaaaagtaagcttctcaggtaaaacatataacgctatccaatatggtttaaacccagaaactggcgaaattgattacgaggaagttgagcgtttagcgcttgaacacaaaccacgcatgattgttgcgggtttctctgcgtatagccaaattgtagattggcagcgtttccgcgacatcgcagacaaaattggtgcttatttatttgtagatatggcacacgtagcaggtctagtggctgcaggtgtttatccaaaccctgtgcaaattgctgacgtaacgactacgacaactcacaaaacattgcgtggcccacgttctggtctaatccttgcgaaagcaaacgaagagatcgagaaaaaattacaatctgctgtgttccctggtaaccaaggtggtccattagtacacgcagttgcagcaaaagcaatttgctttaaagaagcaatggcgcctgaatacaaagcgtatcaacaacaagttgttaaaaatgcgcaagcgatggctgaagttcttattgaacgtggttatgatgtagtatctggtggtacgaaaaaccacttgttcttgctttctttaatcaagcaagatattacaggtaaagatgcagatgcatggttaggtgctgcgcacattactgtaaacaaaaactctgtaccaaacgatccacgttcaccatttgtaacttcaggtatccgtattggtactccagcagtcactacacgtggttttggtgaagcagaagtacgtgatcttgcgagttggattgcagacattcttgacagcaaaggtgacgaagcagtaattaatactgtaaaagcaaaagtcgaagctgtttgcgcgaaattccctgtttacgcaaaataa

SEQ ID NO: 10676 - protein, 417 aa, Unknown
  polypeptide homolog of SEQ ID NO: 9728
MFANISIAEFDPELAQAITNEDARQEAHIELIASENYCSPAVMEAQGSKLTNKYAEGYPGKRYYGGCEYVDIIEQLAIDRAKELFGADYANVQPHAGSQANSAVYLALLNPGDTVLGMSLAHGGHLTHGAKVSFSGKTYNAIQYGLNPETGEIDYEEVERLALEHKPRMIVAGFSAYSQIVDWQRFRDIADKIGAYLFVDMAHVAGLVAAGVYPNPVQIADVTTTTTHKTLRGPRSGLILAKANEEIEKKLQSAVFPGNQGGPLVHAVAAKAICFKEAMAPEYKAYQQQVVKNAQAMAEVLIERGYDVVSGGTKNHLFLLSLIKQDITGKDADAWLGAAHITVNKNSVPNDPRSPFVTSGIRIGTPAVTTRGFGEAEVRDLASWIADILDSKGDEAVINTVKAKVEAVCAKFPVYAK

SEQ ID NO: 10677 - DNA, 1263 bp, Streptomyces avermitilis
  CDS (1)..(1263): transl_table=11
atgtcgcttctgaacacgcctctgcacgagctcgacccggacgtcgccgccgccgtcgacgccgagctgaaccgtcagcagtccaccctcgagatgatcgcctcggagaacttcgctccggtcgcggtcatggaggcccagggctcggtcctcaccaacaagtacgccgagggctacccgggccgccgctactacggcggctgcgagcacgtcgatgtggtcgagcagatcgccatcgaccgggtcaaggagctgttcggcgccgagcacgccaacgtccagccgcactcgggcgcccaggccaacgcggccgccatgttcgcgctgctcaagcccggcgacacgatcatgggtctgaacctcgcgcacggcgggcacctgacccacggcatgaagatcaacttctccggcaagctgtacaacgtggtcgcgtaccacgtggacgagaccaccggccaggtggacatggccgaggtcgagaagctggccaaggagtccaggccgaagctgatcgtggccggctggtcggcgtacccgcgccagttggacttcgccgcgttccgccggatcgcggacgaggtcggcgcgtacctgatggtcgacatggcgcacttcgccggcctggtggcggcgggtctgcacccgaaccccgtgccgcacgcccatgtcgtgaccacgaccacgcacaagacgctgggcggcccgcgcggtggcgtgatcctgtcgacggccgaactggccaagaagatcaactccgcggtcttcccgggtcagcagggtggtccgctggagcacgtgatcgccgccaaggccgtctccttcaaggtcgccgcctccgacgacttcaaggagcgccagcagcgcacgctggacggcgcccgcatcctggccgagcgtctggtccgggacgacgtcaaggccgtgggcgtggacgtcctctcgggcggcacggacgtgcacctggtcctcgtcgacctgcgcgactccgagctggacggccagcaggccgaggaccgcctccacgaggtcggcatcacggtcaaccgcaacgccatcccgaacgacccgcgcccgccgatggtgacgtccggcctgcgcatcggtacgccggccctcgccacccgcggcttccaggccgcggacttcaccgaggtcgcggacatcatcgccgaggcgctgaagccgtcctacgacgcggacgccctcaaggcccgggtgacggcactggcggacaagcacccgctgtatcccggtctgaagtag

SEQ ID NO: 10678 - protein, 420 aa, Streptomyces avermitilis
MSLLNTPLHELDPDVAAAVDAELNRQQSTLEMIASENFAPVAVMEAQGSVLTNKYAEGYPGRRYYGGCEHVDVVEQIAIDRVKELFGAEHANVQPHSGAQANAAAMFALLKPGDTIMGLNLAHGGHLTHGMKINFSGKLYNVVAYHVDETTGQVDMAEVEKLAKESRPKLIVAGWSAYPRQLDFAAFRRIADEVGAYLMVDMAHFAGLVAAGLHPNPVPHAHVVTTTTHKTLGGPRGGVILSTAELAKKINSAVFPGQQGGPLEHVIAAKAVSFKVAASDDFKERQQRTLDGARILAERLVRDDVKAVGVDVLSGGTDVHLVLVDLRDSELDGQQAEDRLHEVGITVNRNAIPNDPRPPMVTSGLRIGTPALATRGFQAADFTEVADIIAEALKPSYDADALKARVTALADKHPLYPGLK

SEQ ID NO: 10679 - DNA, 1554 bp, Flaveria pringlei
  CDS (1)..(1554)
atggcgatggcgttagctcttcgtaggctctcatcttctgcagacaaaccgttgcaacgcctcttcaatggcggtcatctctactctatgtcgtcgttgcctagtgaagctgtgtacgagaaggaacggcctggtgtcacttggccgaagcagttgaatgctccgcttgaggttgtggatcctgagatcgcggatattattgagcttgaaaaggctcggcaatggaagggtcttgaactcataccatcagagaactttacctctctatcagtgatgcaagcagttggatccgtgatgaccaacaaatacagtgaagggtatccaggagctagatactatggtggaaatgagtatattgacatggcggaaacgttgtgtcaaaagcgtgcattggaagcctttcggttggatcctgcaaaatggggagtgaatgtgcagcctctttcaggatcaccagctaatttccatgtctacactgcattattaaaggctcatgacagaatcatggcacttgatcttcctcatggtgggcatctgtcacatggttatcagaccgacacaaagaaaatatctgcggtatctatatttttcgagactatgccttacagattgaatgaaagcactggctatatcgattatgaccagttggagaaaagtgcaacactcttcaggccaaaattgattgttgctggtgcaagtgcttatgctcgattatatgactatgctcgaatccgcaaggtttgtgacaagcaaaaagctattatgttggcagatatggcacacattagtgggttggttgcagctggtgtcatcccatccccttttgactatgcagatgttgtgaccaccacaacccacaagtcactccgaggaccacgtggtgccatgattttctttaggaaaggactgaaagaagtcaacaaacaaggcaaagaggtcttctatgattatgaagacaaaatcaaccaggccgtctttcctggacttcaaggaggtccacacaatcacacaatcactggattggcagttgcattgaaacaggcaacaacagcagaatacaaggcgtaccaagaacaagttatgagtaatagtgccaagtttgcagagactctagttaagagtggatatgaacttgtttctggtggaacagagaaccacttagttttggttaatttgaaaaataagggaattgatggttcaaaggttgaaaaggtgttggaggctgttcacattgcagccaataaaaacactgttcctggtgatgtctctgccatggttcctggtggcatcagaatgggaacccctgctctcacctctaggggatttgttgaagaggactttgctaaagttgcctacttctttgaccttgctgtaaaattggctgtgaagatcaagggtgaagccaaagggacaaagttgaaggactttgtgactgcaatggagtccagtgccatccaatcagaaatctcaaagctacgccatgacgtggaggaatacgcgaaacaattcccgacaatcggatttgagaaagaaaccatgaaatacaaaaactaa

SEQ ID NO: 10680 - protein, 517 aa, Flaveria pringlei
MAMALALRRLSSSADKPLQRLFNGGHLYSMSSLPSEAVYEKERPGVTWPKQLNAPLEVVDPEIADIIELEKARQWKGLELIPSENFTSLSVMQAVGSVMTNKYSEGYPGARYYGGNEYIDMAETLCQKRALEAFRLDPAKWGVNVQPLSGSPANFHVYTALLKAHDRIMALDLPHGGHLSHGYQTDTKKISAVSIFFETMPYRLNESTGYIDYDQLEKSATLFRPKLIVAGASAYARLYDYARIRKVCDKQKAIMLADMAHISGLVAAGVIPSPFDYADVVTTTTHKSLRGPRGAMIFFRKGLKEVNKQGKEVFYDYEDKINQAVFPGLQGGPHNHTITGLAVALKQATTAEYKAYQEQVMSNSAKFAETLVKSGYELVSGGTENHLVLVNLKNKGIDGSKVEKVLEAVHIAANKNTVPGDVSAMVPGGIRMGTPALTSRGFVEEDFAKVAYFFDLAVKLAVKIKGEAKGTKLKDFVTAMESSAIQSEISKLRHDVEEYAKQFPTIGFEKETMKYKN

SEQ ID NO: 10681 - DNA, 1557 bp, Pisum sativum
  CDS (1)..(1557)
atggctatggcaatggcgcttcgtaagctttcatcttccgtcaacaaatcttcacgtcctctcttttctgcttcatctctttactacaagtcttctttgcctgatgaagctgtttacgacaaagagaatccacgtgttacgtggccaaagcaattgaattctccacttgaggttattgatcctgaaattgctgatataattgagcttgaaaaagctagacagtggaaggggctggaactgataccatcagagaattttacttctttatctgttatgcaagctgttggctctgtcatgacaaacaaatacagtgaaggttatcctggggcaagatattatggaggaaatgagtatattgacatggcagaaacactatgccagaagcgtgccttggaagcatttcggttggatcctgctaaatggggagtgaatgtgcagcctctgtctggttcgccttcaaactttcaagtttacactgcattgttgaaacctcatgatagaatcatggcacttgatctccctcatggagggcatctttctcatggataccagaccgacaccaaaaagatatctgcagtctctatattttttgagacaatgccatataggttggatgaaagcacaggatacattgactatgaccagctagagaaatcggctacactcttcaggccaaagttaatagttgccggtgctagtgcctatgcaaggctgtatgattatgcacgcatacgcaaggtttgcgataaacagaaagctgtgttgttagcagatatggcacatatcagtggattggttgcagctggtgttatcccttcaccttttgattatgcagatgtagtgacaaccacaactcacaagtcacttcgcggcccacgtggagctatgatatttttcaggaagggattaaaagaagtcaacaaacaaggaaaagaggtgttctatgactatgaggacaaaatcaatcaagctgtcttccccggactgcaaggtggtcctcacaaccataccattacaggtttagctgttgcattgaagcaggctacaactccagagtatagagcatatcaagagcaggttctcagcaatagctcaaagtttgcaaaggctctgagtgagaaaggctatgatcttgtttccggtgggactgagaatcatttagttttggtgaatctgaagaacaagggtattgatgggtccagagttgagaaagtgttggaattagtacatattgctgctaataaaaacacagttccaggagatgtgtctgctatggttcctggtggcatcaggatgggaactcctgcgcttacttcaaggggatttgttgaggaggatttcgttaaggtagcagagtattttgatgcagctgtgagtttggccttgaaggttaaggcagaaagcaaaggaacaaaattaaaggacttcgtggaagcattgcagacatcctcttacgtgcaatcagagatttccaagcttaagcatgatgttgaggagtttgcaaaacaatttccaaccattggttttgaaaaagcaaccatgaagtacaacaaataa

SEQ ID NO: 10682 - protein, 518 aa, Pisum sativum
MAMAMALRKLSSSVNKSSRPLFSASSLYYKSSLPDEAVYDKENPRVTWPKQLNSPLEVIDPEIADIIELEKARQWKGLELIPSENFTSLSVMQAVGSVMTNKYSEGYPGARYYGGNEYIDMAETLCQKRALEAFRLDPAKWGVNVQPLSGSPSNFQVYTALLKPHDRIMALDLPHGGHLSHGYQTDTKKISAVSIFFETMPYRLDESTGYIDYDQLEKSATLFRPKLIVAGASAYARLYDYARIRKVCDKQKAVLLADMAHISGLVAAGVIPSPFDYADVVTTTTHKSLRGPRGAMIFFRKGLKEVNKQGKEVFYDYEDKINQAVFPGLQGGPHNHTITGLAVALKQATTPEYRAYQEQVLSNSSKFAKALSEKGYDLVSGGTENHLVLVNLKNKGIDGSRVEKVLELVHIAANKNTVPGDVSAMVPGGIRMGTPALTSRGFVEEDFVKVAEYFDAAVSLALKVKAESKGTKLKDFVEALQTSSYVQSEISKLKHDVEEFAKQFPTIGFEKATMKYNK

SEQ ID NO: 10683 - DNA, 1557 bp, Solanum tuberosum
  CDS (1)..(1557)
atggctatggcaatagctcttcggaggctttccgctacagttgacaaaccggttaagagtctctacaatggtggctctctctattacatgtcatcactgcctaatgaagctgtatacgacaaagaaaaatctggggtagcttggccaaagcaactgaatgctccactagaggttgttgatcctgagattgctgacattattgagcatgagaaagcacgccaatggaaggggctcgaactcattccatcagaaaatttcacttctgtttcggtgatgcaagcagttggatcagtcatgactaacaagtacagtgaaggatatcctggtgccagatactatgggggaaatgagtacatagacatggcagaaaccttatgccagaaacgtgctttggaagcattcaggttggatcctgcaaaatggggagtgaatgtgcagcctctatcaggatcacccgctaattttcaagtttacactgcattattaaaacctcatgagagaatcatggctcttgatcttcctcatggtggacatctttctcatggatatcagactgatacaaagaagatatctgcagtctctatattctttgagacaatgccatacagactcgatgagagcactggctatattgactatgaccagctcgagaaaagtgccacactctttcggccaaaattgattgttgctggtgctagtgcctacgcacgtctttatgactatgacagaatccgaaaggtttgcaacaaacagaaagctattttgttagcagatatggcacacattagtggattggttgcagctggagttatcccatcaccatttgattatgctgatgttgtcactaccacaacccacaagtcccttcgtggccctcgtggtgctatgattttttacaggaagggtgttaaagaggttaacaagcaaggcaaggaggttttctacgactatgaagacaaaattaaccaggcagtctttcctggacttcaaggtggtccccacaatcacaccatcactggcttggcagttgccttgaaacaggccactactccagaatacagagcttaccaagagcaagttctcagcaactcctcaaaatttgcccaggctttaggggagaagggctatgaacttgtctctggaggaaccgataatcacttggttttggtgaacatgaaaaacaagggtattgatggttccagggttgaaaaagtcttggaagctgtacatattgcagccaacaagaacaccgttcctggagatgtatctgccatggtccctggtggcatcagaatgggaactcctgcactcacttctcggggatttcttgaggaagattttgttaaagttgctgatttctttgatgctgctgtgaagatagcagtgaaagtaaaggctgaaactcaagggacaaagttgaaagactttgtagcaacactagaatccagtgctccaatcaagtctgaaattgcaaaactccgtcatgatgtggaggagtatgctaagcagttccctacaattgggtttgagaaagaaaccatgaagtacaaaaactaa

SEQ ID NO: 10684 - protein, 518 aa, Solanum tuberosum
MAMAIALRRLSATVDKPVKSLYNGGSLYYMSSLPNEAVYDKEKSGVAWPKQLNAPLEVVDPEIADIIEHEKARQWKGLELIPSENFTSVSVMQAVGSVMTNKYSEGYPGARYYGGNEYIDMAETLCQKRALEAFRLDPAKWGVNVQPLSGSPANFQVYTALLKPHERIMALDLPHGGHLSHGYQTDTKKISAVSIFFETMPYRLDESTGYIDYDQLEKSATLFRPKLIVAGASAYARLYDYDRIRKVCNKQKAILLADMAHISGLVAAGVIPSPFDYADVVTTTTHKSLRGPRGAMIFYRKGVKEVNKQGKEVFYDYEDKINQAVFPGLQGGPHNHTITGLAVALKQATTPEYRAYQEQVLSNSSKFAQALGEKGYELVSGGTDNHLVLVNMKNKGIDGSRVEKVLEAVHIAANKNTVPGDVSAMVPGGIRMGTPALTSRGFLEEDFVKVADFFDAAVKIAVKVKAETQGTKLKDFVATLESSAPIKSEIAKLRHDVEEYAKQFPTIGFEKETMKYKN

SEQ ID NO: 10685 - DNA, 1554 bp, Flaveria pringlei
  CDS (1)..(1554)
atggcgatggcatcggctcttcgtaggctctcatcttcttcaaacaaaccgttgcagcgtctgttcaatggcggtcatctatattcaatgtcatcgttgcctagtgaagctgtgtatgagaaagaaaggcctggcgtcacttggccgaaacagttgaacgctccacttgaggttggggatcctgagattgctgatattattgagcttgaaaaggctcggcaatggaagggtcttgaactcatactctcagagaactttacctccctgtcagtgatgcaagcagttggatctgtgatgactaacaaatacagtgaagggtatccgggtgctagatactatggtggaaatgagtacattgacatggcggaaaccttgtgtcagaagcgtgccttggaagcctttcggttagatgctgcaaaatggggagtgaatgtgcaacctctttcagggtcaccagcaaatttccatgtctatactgcattattaaaggctcatgacagaatcatggcacttgatcttcctcatggtggccatctgtcacatggttatcagactgatacaaagaagatatctgcagtatccatatttttcgagactatgccttacagattgaacgagagcaccggctatattgattatgaccagttggagaaaagtgccacacttttcaggccaaaactgatagttgctggcgcaagtgcttatgctagattatatgactatgcacgtattcgtaaggtttgtgacaagcaaaaagccattttgttagcagatatggcacacattagtgggttggtagcagctggtgtcatcccatccccatttgactatgcagatgttgtgaccacaaccacccacaagtcacttcggggcccacgaggcgccatgattttcttcaggaaaggggtgaaagaagtcaacaaacaaggcaaagaggttctctatgattatgaagacaaaatcaaccaggctgtctttcctgggcttcaaggtggcccacacaatcacacaatcactggattggcagttgcattgaaacaggcaacaacagcagaatataaggcatatcaagagcaagtcatgagtaattgtgccaaatttgcagagactctagttaagagcggatatgaacttgtttccgggggaacagagaaccacttagtgttggtcaatttgaagaataagggaattgatggttcaagggttgaaaaggtgttggaagctgttcacattgcagccaataaaaacactgttcctggtgatgtgtctgccatggttcctggtggcatcagaatgggaacccctgctctcacttctaggggatttgttgaagaggattttgctaaagttgcctacctctttgaccttgctgtaaaattggctgtgaagatcaagggtgaagcccaagggacaaagttgaaggactttgtggctgcaatgcagtccagtgccttccaatcagaaatttcaaagctacgccacgacgtggaggagtatgccaaacaattcccaacaatcgggtttgagaaagaaaccatgaaatacaaaaactga

SEQ ID NO: 10686 - protein, 517 aa, Flaveria pringlei
MAMASALRRLSSSSNKPLQRLFNGGHLYSMSSLPSEAVYEKERPGVTWPKQLNAPLEVGDPEIADIIELEKARQWKGLELILSENFTSLSVMQAVGSVMTNKYSEGYPGARYYGGNEYIDMAETLCQKRALEAFRLDAAKWGVNVQPLSGSPANFHVYTALLKAHDRIMALDLPHGGHLSHGYQTDTKKISAVSIFFETMPYRLNESTGYIDYDQLEKSATLFRPKLIVAGASAYARLYDYARIRKVCDKQKAILLADMAHISGLVAAGVIPSPFDYADVVTTTTHKSLRGPRGAMIFFRKGVKEVNKQGKEVLYDYEDKINQAVFPGLQGGPHNHTITGLAVALKQATTAEYKAYQEQVMSNCAKFAETLVKSGYELVSGGTENHLVLVNLKNKGIDGSRVEKVLEAVHIAANKNTVPGDVSAMVPGGIRMGTPALTSRGFVEEDFAKVAYLFDLAVKLAVKIKGEAQGTKLKDFVAAMQSSAFQSEISKLRHDVEEYAKQFPTIGFEKETMKYKN

SEQ ID NO: 10687 - DNA, 1530 bp, Brassica napus
  CDS (1)..(1530)
atgtcgttggctcttcgcagactctcctcttccctcaagaagcccatcttctccaatggcggttccttccgttctatgtcgtctacgccaacctcggagagatctcgttccacttggataagccaactcaacgcacctctggaagaaatcgatcccgaaatcgcagatatcatcgagcttgagaaggctaggcaatggaagggatttgagcttataccctcagagaacttcacctctgcctcggttatggaagctgtgggctctgttatgactaacaagtatagtgaaggttaccctggtgctagatactatggaggcaatgagtacattgacatggctgagtcactctgtcaaaaacgcgcattagaagcttttcagttagatccttccaaatggggagtcaatgtgcagtctttatcaggatcaccagctaacttccaagtttacaccgcacttctgaaacctcacgaaagaatcatggcacttgacttgcctcacggtggccatctttctcatggttatcagactgacacgaagaaaatatctgctgtatccatcttttttgagacaatgccatacagattggatgagaacactggctacattgattatgatcagctagaaaagagtgccgtgcttttcagacccaaacttatcgttgcaggtgcaagtgcttatgctcgtctgtatgactatgcacgtatccgtacggtctgtgacaagcaaaaggcggttatgctggctgacatggctcatattagtgggttggttgctgctggtgtgattccttctccttttgagtatgcagatgttgttaccactacaactcacaaatcgcttcgtggtcctagaggggctatgatattctttaggaaggggttgaaagaggttaacaaacaaggaaaagaggtcatgtatgactatgaagacagaattaacgcagctgtttttcctggactgcaaggtggtccacataatcacactataacaggtctagcagttgctctgaagcaggtgaaaacaccagagtataaggcctaccaggatcaagttctccgtaattgttcaaagttcgcagagactttgctatcaaaaggatatgacttagtgtctggaggcactgagaatcacttagttttggtgaatttgaaaaataagggaatcgatggatcaagagtggaaaaagtattagaatcagtacatattgcagcaaacaagaacactgttcccggtgatgtttctgctatggttcctggcggcatccgtatgggaacaccagctctgacatcaagaggattcattgaggaagattttgcaaaagtggctgaatactttgatttagccgtcaagatagccttgaagatcaaggcagagtctcaaggaacaaagctgaaggactttgtagcaacaatgcaatcaaatgagaagttacagtcagagatggcaaagctgcgtgagatggttgaagaatatgctaaacagttcccaaccattgggttcgagaaagagacgatgagatacaaagaatag

SEQ ID NO: 10688 - protein, 509 aa, Brassica napus
MSLALRRLSSSLKKPIFSNGGSFRSMSSTPTSERSRSTWISQLNAPLEEIDPEIADIIELEKARQWKGFELIPSENFTSASVMEAVGSVMTNKYSEGYPGARYYGGNEYIDMAESLCQKRALEAFQLDPSKWGVNVQSLSGSPANFQVYTALLKPHERIMALDLPHGGHLSHGYQTDTKKISAVSIFFETMPYRLDENTGYIDYDQLEKSAVLFRPKLIVAGASAYARLYDYARIRTVCDKQKAVMLADMAHISGLVAAGVIPSPFEYADVVTTTTHKSLRGPRGAMIFFRKGLKEVNKQGKEVMYDYEDRINAAVFPGLQGGPHNHTITGLAVALKQVKTPEYKAYQDQVLRNCSKFAETLLSKGYDLVSGGTENHLVLVNLKNKGIDGSRVEKVLESVHIAANKNTVPGDVSAMVPGGIRMGTPALTSRGFIEEDFAKVAEYFDLAVKIALKIKAESQGTKLKDFVATMQSNEKLQSEMAKLREMVEEYAKQFPTIGFEKETMRYKE

SEQ ID NO: 10689 - DNA, 1416 bp, Triticum aestivum
  CDS (1)..(1416)
atggactccgtcgcgtcgtgggggctgaccccgctggcggacgcggacccggacgtcttcgacctcatcgagcgggagaagcggcgccagcggagcgggatcgagctcatcgcctcggagaacttcacctccttcgccgtcatcgaggcgctcggctcggccctcaccaacaagtactccgagggcatgccgggggcgcgctactacggcggcaacgacgtcatcgacgagatcgagaacctctgccgcgaccgcgccctcgccgccttccgcctcgacgccgcctcctggggcgtcaacgtgcagccctactccggctcgcccgccaacttcgccgcctacaccgcgctcctcaacccgcacgaccggatcatggggctcgacctcccctcgggcggccacctcacccacggctactacaccgccggggggaagaagatctccgccacctccatctacttcgagagcctgccctacaaggtcagcgccgccaacggctacatcgactacgacaagctcgaggagaaggccatggacttccgccccaagctcatcatctgcggaggcagcgcctaccccagggactgggactacgccaggctcagggccgtcgccgacaaggtcggggccatgctcctctgcgacatggcgcacatcagcggactggtcgccgcgcaggaagctgcaaatccttttgagttctgcgatgtggttaccactacaacacacaagtctctccggggaccgagggctggcatgatcttctacaggaaaggccctaagcctgcgaagaagggccagcctgagggtgctgtgtatgactatgaggacaagatcaactttgcggtgttcccatcgctccagggtggtccccacaatcaccagattgctgcccttgcagttgccctgaagcaaactttgactcctggattcaaggcctatgcaaagcaggtcaaggccaacgctgttgccgttggaaaatatctcatgagcaagggttacaagatggtaaccgatggaactgacaaccatcttgttctatgggatctccgccctcttggcttgactggaaacaaggtcgaaaagatgtgtgacctttgcagcattacattgaacaagaatgctgtcttcggtgacagcagtgcattgtccccgggtggtgtccgcattggtgctcccgcgatgacttccaggggtctggtcgagaaggacttcgagcagatcgccgagttcctccaccaggctgtgaccatctgcctgaacatccagaaggagcacggcaagctgctcaaggacttctccaagggcctggtgaacaacaaggacatcgagaacctcaaggttgaggtcgagaagtttgccctctccttcgacatgcctgggttctcgctcgagagcatgaagtacaaggagtag

SEQ ID NO: 10690 - protein, 471 aa, Triticum aestivum
MDSVASWGLTPLADADPDVFDLIEREKRRQRSGIELIASENFTSFAVIEALGSALTNKYSEGMPGARYYGGNDVIDEIENLCRDRALAAFRLDAASWGVNVQPYSGSPANFAAYTALLNPHDRIMGLDLPSGGHLTHGYYTAGGKKISATSIYFESLPYKVSAANGYIDYDKLEEKAMDFRPKLIICGGSAYPRDWDYARLRAVADKVGAMLLCDMAHISGLVAAQEAANPFEFCDVVTTTTHKSLRGPRAGMIFYRKGPKPAKKGQPEGAVYDYEDKINFAVFPSLQGGPHNHQIAALAVALKQTLTPGFKAYAKQVKANAVAVGKYLMSKGYKMVTDGTDNHLVLWDLRPLGLTGNKVEKMCDLCSITLNKNAVFGDSSALSPGGVRIGAPAMTSRGLVEKDFEQIAEFLHQAVTICLNIQKEHGKLLKDFSKGLVNNKDIENLKVEVEKFALSFDMPGFSLESMKYKE

SEQ ID NO: 10691 - DNA, 1416 bp, Linum usitatissimum
  CDS (1)..(1416)
atggatccagtcaaggtatggggaaacactcctttgcaaaccgtggaccctgagatccacgacctcatcgagaaggagaagcgccgtcaatgccgcgggatcgagctcatcgcctccgagaacttcacctccttcgccgtcatcgaagccctcggcagcgccctcaccaacaagtactccgagggcatgcccggaaatcgctactacggcggcaacgagtacatcgatcagatcgagaacctctgcgtatcccgcgccttgaccgctttccacttggacgacaccaagtggggcgtcaatgtccagccttactccggctcccctgccaatttcgccgcctacaccgccattctcaagccccatgatcgtatcatgggattggatctcccatctggtggtcatctgactcatggatactacacctccagcgggaagaagatctccgcaacttccatttacttcgagagcttgccttacaaggtgaattccagcactggctacatcgactacgataagctggaagagaaggctttggatttcaggccacggttgatcatctgtggtggcagtgcttaccctagggactgggattacgctagatttagggctattgctgataaatgcggtgctcttttgctctgcgatatggctcacattagcggcctagttgctgctcaggaagctgccaacccctttgagttctgtgacattgtcacaaccaccacccacaagagtttgaggggtcccagagctggtatgatcttctaccgcaagggacctaagccagccaacaagaagggtcagcctcaaggcaactatgaattcgaggacaacatcaacttctctgtcttccctgccctccagggaggcccccataatcaccagatcggtgcccttgctgttgcattgaagcaggccgcgacccctgcattcaaggcctatgccaagcaagtgaaggccaatgctgttgctgttgggaactatttgatgagcaaaggctacaccttggtcactggaggaactgagaaccaccttgttctgtgggatctgagacctcttgggttgactggtaacaaggtcgagaaggtttgcgatctctgtaacatcactgtgaacaagaatgcagtgttcggagacagcagtgcattgtccccaggaggcgtgagagttggggcacctgccatgacttcaagagggttgttggagaaagactttgagcaaatcggagagttcctccaccgtgctgtggccttaacactgagcatccagaaggaatatgggaagttactgaaggacttcaacaagggcctggagaacaacaaagagatcgaagcattgaaagctgatgttgagaaatttgcaggttcatttgatatgcctggtttcctcatgtctgagatgaagtaccaggagtaa

SEQ ID NO: 10692 - protein, 471 aa, Linum usitatissimum
MDPVKVWGNTPLQTVDPEIHDLIEKEKRRQCRGIELIASENFTSFAVIEALGSALTNKYSEGMPGNRYYGGNEYIDQIENLCVSRALTAFHLDDTKWGVNVQPYSGSPANFAAYTAILKPHDRIMGLDLPSGGHLTHGYYTSSGKKISATSIYFESLPYKVNSSTGYIDYDKLEEKALDFRPRLIICGGSAYPRDWDYARFRAIADKCGALLLCDMAHISGLVAAQEAANPFEFCDIVTTTTHKSLRGPRAGMIFYRKGPKPANKKGQPQGNYEFEDNINFSVFPALQGGPHNHQIGALAVALKQAATPAFKAYAKQVKANAVAVGNYLMSKGYTLVTGGTENHLVLWDLRPLGLTGNKVEKVCDLCNITVNKNAVFGDSSALSPGGVRVGAPAMTSRGLLEKDFEQIGEFLHRAVALTLSIQKEYGKLLKDFNKGLENNKEIEALKADVEKFAGSFDMPGFLMSEMKYQE

SEQ ID NO: 10693 - DNA, 1416 bp, Zea mays
  CDS (1)..(1416)
atggaccccgtcgccacatgggggctaaccccgcccgcgggcgccgacccggagatctacgacctcctggagcgcgagaagcggcgccagcgtcgcggcatcgagctcatcgcctccgagaacttcacctccttcgccgtcatggaggcgctcggctccgcgctcactaacaagtactccgagggcatgcccggcgcccgctactacggcggcaacgacgtcatcgacgagatcgagaacctctgccggtcacgcgcgctcgctgccttccaccttgacgccgcgtcctggggcgtcaacgtgcagccctactcgggctcccccgccaacttcgccgcctacaccgcgctgctcaacccgcacgaccggatcatggggctcgaccttccctccggcggacacctcactcacgggtactacacggccggcggtaagaagatctccgccacctcgatctactttgagagcctgccgtacaaggtgagcgccgcaacggggtacatcgactacgagaagctcgaggagaaggcacttgacttccgccccaagctcatcatctgcggtggcagtgcgtacccgagggactgggattacgccaagctcagggccgtcgccgacaaggtcggggccctgctgctctgcgacatggcgcacatcagcgggctcgtcgccgcgcaggaagctgcaaatccttttgaatattgtgatgtggttaccacaaccacgcacaagtccctcagagggccaagggctggcatgatcttctacaggaaaggccctaagccccccaagaagggccagcctgagggtgctgtttatgattacgaagacaagatcaactttgcagtgttcccatctctccaaggtggccctcacaaccaccagattgctgcacttgctgttgctctacagcaaactatgtcgcctggcttcaaggcctatgcaaagcaagtgaaggccaatgctgttgcaattggaaactatctcatgagcaagggctacaagatggtgactgatggaactgagaaccaccttgttctctgggatctccgcccccttggcttgactggaaacaaggtcgaaaagctatgtgatctttgccacatcacattgaacaagaatgctgtcttcggtgacagcagtgcattgtctccgggtggtgtccgcattggcgcgccagcaatgacctcgaggggtctactggagaaggatttcgagcagattggggagttcctccaccaggcagtgaccatctgcctgaacatccagaaggagtacggcaagctcctcaaggacttcaacaagggcctggtgaacaacaaggacatcgagaacctcaaggtccaggtggagaagtttgccgactccttcgacatgcctgggttcacgcttgagagcatgaaatacaaggagtag

SEQ ID NO: 10694 - protein, 471 aa, Zea mays
MDPVATWGLTPPAGADPEIYDLLEREKRRQRRGIELIASENFTSFAVMEALGSALTNKYSEGMPGARYYGGNDVIDEIENLCRSRALAAFHLDAASWGVNVQPYSGSPANFAAYTALLNPHDRIMGLDLPSGGHLTHGYYTAGGKKISATSIYFESLPYKVSAATGYIDYEKLEEKALDFRPKLIICGGSAYPRDWDYAKLRAVADKVGALLLCDMAHISGLVAAQEAANPFEYCDVVTTTTHKSLRGPRAGMIFYRKGPKPPKKGQPEGAVYDYEDKINFAVFPSLQGGPHNHQIAALAVALQQTMSPGFKAYAKQVKANAVAIGNYLMSKGYKMVTDGTENHLVLWDLRPLGLTGNKVEKLCDLCHITLNKNAVFGDSSALSPGGVRIGAPAMTSRGLLEKDFEQIGEFLHQAVTICLNIQKEYGKLLKDFNKGLVNNKDIENLKVQVEKFADSFDMPGFTLESMKYKE

SEQ ID NO: 10695 - DNA, 1554 bp, Brassica napus
  CDS (1)..(1554)
atggcgatggctatggctcttcggaggctttcttcttcagttgacaaacctattcgtcctcttatcagatcatcttcatgctacatgtcttctttaccaagtgaagctgttgatgacaaggagaggtctcgtgtcacttggccaaaacagcttaacgcatctttggaggaagttgatcctgagattgctgacattattgagcatgagaaagctagacaatggaagggacttgaactcattccatctgagaatttcacatctgtctcggtgatgcaagctgttggctctgtgatgactaacaagtacagtgaagggtaccctggtgctagatactatggaggaaatgagtacatagacatggcagagactttatgccaaaagcgcgctcttgaggctttcagattagatcctgaaaagtggggagtgaatgtgcaacccttgtctggatctcctgccaacttccatgtctacactgcattgctcaaacctcatgagagaatcatggcacttgatcttcctcatggtggtcatctttctcatggttatcagactgacaccaagaagatatctgctgtgtctatcttctttgagacaatgccttatcgcttggacgagagcactggctacattgactatgatcagatggagaaaagtgctactcttttcaggccaaaactgattgttgctggtgcgagtgcttatgctcgattgtatgactatgcccgcatccgaaaggtgtgtaacaagcaaaaagctgtgatgctagcagatatggcacacatcagtggtttggttgctgctggtgtaatcccttcaccgttcgactatgcagatgttgtgaccaccacaactcacaagtcacttcgtggaccccgtggagccatgattttctacagaaagggtgttaaggaaattaacaaacaagggaaagaggttttgtatgattttgaagacaagataaatcaagctgtcttccctggtcttcaaggtggtccacataaccacactattacaggactagctgttgctttaaaacaggcaactacttcagagtacaaagcataccaagagcaagtcctgagtaactctgcaaagttcgctcagactctgatggagaaaggttatgaacttgtttctggtggaaccgacaaccatctggttctagtgaacctgaagcccaagggaattgatggatctagagttgagaaagtgttggaagctgttcacattgcatcaaacaaaaacactgttcctggagatgtttctgccatggttcctggtggaatcagaatgggtacacctgctctcacttccagaggctttgttgaggaagactttgctaaagtagctgaatactttgacaaagctgtaacgttggctctcaaagtcaaatctgaagctcaagggaccaagctgaaagactttgtgtcagcaatggaagcttcttcaaccattcaatcagagattgctaagctgcgccatgaagttgaggaatttgctaaacagtttccaacaattgggtttgagaaagaaaccatgaagtacaagaactaa

SEQ ID NO: 10696 - protein, 517 aa, Brassica napus
MAMAMALRRLSSSVDKPIRPLIRSSSCYMSSLPSEAVDDKERSRVTWPKQLNASLEEVDPEIADIIEHEKARQWKGLELIPSENFTSVSVMQAVGSVMTNKYSEGYPGARYYGGNEYIDMAETLCQKRALEAFRLDPEKWGVNVQPLSGSPANFHVYTALLKPHERIMALDLPHGGHLSHGYQTDTKKISAVSIFFETMPYRLDESTGYIDYDQMEKSATLFRPKLIVAGASAYARLYDYARIRKVCNKQKAVMLADMAHISGLVAAGVIPSPFDYADVVTTTTHKSLRGPRGAMIFYRKGVKEINKQGKEVLYDFEDKINQAVFPGLQGGPHNHTITGLAVALKQATTSEYKAYQEQVLSNSAKFAQTLMEKGYELVSGGTDNHLVLVNLKPKGIDGSRVEKVLEAVHIASNKNTVPGDVSAMVPGGIRMGTPALTSRGFVEEDFAKVAEYFDKAVTLALKVKSEAQGTKLKDFVSAMEASSTIQSEIAKLRHEVEEFAKQFPTIGFEKETMKYKN

SEQ ID NO: 10697 - DNA, 1530 bp, Brassica napus
  CDS (1)..(1530)
atggcgttggctcttcgcagactctcctcttccctcaagaagcccatcttctccaatggcggttccttccgttctatgtcgtctacgccagcctcggagagatctcgttccacttggataagccaactcaacgcacctctggaagaaatcgatcccgaaatcgcagatatcatcgagctcgagaaggctaggcaatggaagggatttgagcttataccgtcagagaacttcacatctgcctcggtgatggaagctgtgggctctgttatgactaacaagtatagtgaaggttaccctggtgctagatactatggaggcaatgagtacattgacatggctgagtcattatgtcaaaaacgcgcacttgaagcttttcacttagatccttccaaatggggagtcaatgtgcagtctttatcaggatcaccagctaacttccaagtttacactgcattgctgaagcctcacgaaagaatcatggcacttgacttgcctcatggtggccatctttctcatggttatcagactgacacgaagaaaatatctgctgtatccatcttttttgagacaatgccatacagattggacgagaacactggttacattgattatgatcagctagagaaaagtgccgtgcttttcagacctaaactgattgttgcaggtgcaagtgcttatgctcgtctatatgactatgcacgtattcgtaaggtctgtgacaagcaaaaggcggatatgctggctgacatggctcatattagtgggttggttgctgctggtgtgataccttctcctttcgagtatgcagatgttgttaccactacaactcacaaatcgcttcgtggtccaagaggggctatgatattctttacgaaggggttgaaagaggttaacaaacaaggaaaagaggtcatgtatgactatgaagacagaattaacgcagctgtttttcctggactgcaaggtggtccacataatcacacaataacaggtctagcagttgctctgaagcaggtgaaaacaccagagtataaggcctaccaggatcaagttctccgcaactgctcaaagtttgcagagactttgctatcaaaaggatatgacttagtatctggaggcactgacaatcatttagtcttggtgaacttgaaaaacaagggaatagatggatcaagagtggaaaaagtattagaatcagtacatattgcagcaaacaaaaacactgttccgggtgacgtttccgctatggttccaggcggcatccgtatgggaacaccagctctcacatcaagaggattcattgaggaagattttgcaaaagtagctgaatacttcgatttagccgtcaagatagccttgaagatcaaggcagagtctcaaggaacaaagctgaaggactttgtagcaacgatgcaatcaaatgagaagttacagtcagagatggcaaagctgcgtgagatggttgaagaatatgctaaacagttcccaaccattgggttcgagaaagagacgatgagatacaaagagtag

SEQ ID NO: 10698 - protein, 509 aa, Brassica napus
MALALRRLSSSLKKPIFSNGGSFRSMSSTPASERSRSTWISQLNAPLEEIDPEIADIIELEKARQWKGFELIPSENFTSASVMEAVGSVMTNKYSEGYPGARYYGGNEYIDMAESLCQKRALEAFHLDPSKWGVNVQSLSGSPANFQVYTALLKPHERIMALDLPHGGHLSHGYQTDTKKISAVSIFFETMPYRLDENTGYIDYDQLEKSAVLFRPKLIVAGASAYARLYDYARIRKVCDKQKADMLADMAHISGLVAAGVIPSPFEYADVVTTTTHKSLRGPRGAMIFFTKGLKEVNKQGKEVMYDYEDRINAAVFPGLQGGPHNHTITGLAVALKQVKTPEYKAYQDQVLRNCSKFAETLLSKGYDLVSGGTDNHLVLVNLKNKGIDGSRVEKVLESVHIAANKNTVPGDVSAMVPGGIRMGTPALTSRGFIEEDFAKVAEYFDLAVKIALKIKAESQGTKLKDFVATMQSNEKLQSEMAKLREMVEEYAKQFPTIGFEKETMRYKE

SEQ ID NO: 10699 - DNA, 1416 bp, Brassica napus
  CDS (1)..(1416)
atggatccagtctcagcctggggaaacacccctcttgtcaccgtcgatccagagatccacgatctcatcgaaaaggagaagcgtcgtcaatgccgcggaatcgaactcatcgcctccgagaacttcacttccttcgccgtcatcgaagctctcggaagcgcactcaccaacaaatactccgaaggcatgcctggcaaccgttactacggaggtaacgagttcatcgaccagatcgagaatctctgccagtcacgcgctctcgaagccttccgtctcgattccgcatcatggggcgtcaatgttcagccctactccggatctccggccaatttcgccgcctacaccgccttgcttcagcctcacgatcgtatcatgggcctcgatctaccttcaggtggtcatctcacgcatggatactatacgtccggtgggaagaagatctctgctacttcgatctactttgagagccttccgtataaggtcaacttcaccactggttacattgattacgataagctcgaggagaaggccatggatttcaggcctaagttgctcatctgtggtggtagtgcctaccctagggattgggattacgctagattgagagctgttgctgataaggttggagctctcttgctctgtgacatggctcacatcagtggactcgttgctgctcaggaagctgcaaacccatttgagtactgtgacgttgtgacaaccacaacccacaagagtttgaggggtccaagggctggtatgatcttctacaggaagggcccaaaaccaccaaagaagggacaacccgagggtgcagtctatgactttgaggacaaaatcaactttgctgtgttccctgcgcttcaaggtggtcctcacaaccaccagatcggtgctctagctgttgcgttgaagcaggctaacactcctggtttcaaggtctatgcgaaacaggtgaaagccaatgctgttgcccttgcaaactacctgatgggtaagggatacagtatcgtaaccggtggaactgagaaccaccttgttctttgggatcttcgccctcttggattgaccggtaacaaggttgagaagctttgcgatctgtgcaacattactttgaacaagaatgctgtctttggagacagcagtgctcttgctcctggaggtgtaagaatcggtactcctgcgatgacatcaaggggattggtggagaaggactttgagatgataggagagttcttgagccgatcagtgacactgacattgaacatccagaaggagcatggtaaactgttgaaggacttcaacaagggtttggtgaacaacaaagagatcgaggagctcaaggctgatgtcgagaagttctcagcctcctatgagatgcctggattcctcatgtctgcgatgaagtaccaggattag

SEQ ID NO: 10700 - protein, 471 aa, Brassica napus
MDPVSAWGNTPLVTVDPEIHDLIEKEKRRQCRGIELIASENFTSFAVIEALGSALTNKYSEGMPGNRYYGGNEFIDQIENLCQSRALEAFRLDSASWGVNVQPYSGSPANFAAYTALLQPHDRIMGLDLPSGGHLTHGYYTSGGKKISATSIYFESLPYKVNFTTGYIDYDKLEEKAMDFRPKLLICGGSAYPRDWDYARLRAVADKVGALLLCDMAHISGLVAAQEAANPFEYCDVVTTTTHKSLRGPRAGMIFYRKGPKPPKKGQPEGAVYDFEDKINFAVFPALQGGPHNHQIGALAVALKQANTPGFKVYAKQVKANAVALANYLMGKGYSIVTGGTENHLVLWDLRPLGLTGNKVEKLCDLCNITLNKNAVFGDSSALAPGGVRIGTPAMTSRGLVEKDFEMIGEFLSRSVTLTLNIQKEHGKLLKDFNKGLVNNKEIEELKADVEKFSASYEMPGFLMSAMKYQD

SEQ ID NO: 10701 - DNA, 1590 bp, Brassica napus
  CDS (1)..(1590)
atgcaagcttgttgtggaggtacttcaatggggtctcttcagcaacctgtacgggttcaaagacctgtctttgctccaataacctccccagtgactaaattctcccagcaactgaagctcagtttcccgagaccttgcccttctttgtttctgagaaaaagctcggtctttgaaaggagagcgtcttcagtctcagcacctgatgtggagactaccagcaatgagatcccattcgaggactacggtcgtcgtgaagtggatccagaggtcgatgagataatcaccaaggagaaaaacagacagttcaggagcttggagcttattgcgtccgagaatttcacttctcgagctgttatggagactgttggatcatgccttaccaacaagtactccgagggtcttcctggtaaaaggtactatggtggcaatgagtttatagatcagttggagacactttgccagaaccgtgctttagcaaccttccggttagattctaccaaatggggtgcgaatgatcagccgttatctggttcacctgcaaactttgctgtctacaccgccatactcaagcctcatgatcgtatcatgggtttggatttacctcatggtggacatctatcacatgggttcatgactgccaaaagacgtgtgtctggaacttcgatatactttgagtccatgccttatcggcttgatgaatcaacaggcattgtggactatgatatgctcgagaaaactgctgtactgttccgaccaaagcttataattgcaggagctagtgcgtacagccgagactttgactatcctcgcatgaggaagatcgcagactcagttggtgcttttctgatgatggatatggctcacatcagtggacttgtggctgcttctgtggtagctgatccttttgagtattgtgatattgttacaacaaccactcacaagtctttgagaggtccaagaggtggaatgatcttcttcaagaaggatccagttaatggggttgaacttgaatctgcaattaacaacgctgtcttccctggtctgcagggtggacctcataaccacacaattggaggattagcagtctgcttgaaacacgcacagtcgccagaattcaaggcttaccagaaaagagttgtggctaactgtagagctctagctaaccgattggttgaactcgggtttaagctggtttctggtggcagcgacaaccacctggtcctcgtggatcttagaccattgggaatggatggtgcacgggtcgagaaaatcttagacatggcatctattacactcaacaagaactctgtccctggggacaagagtgcgttggttccagggggaataaggataggaacgcctgcaatgacgacaagaggactgtcagagaaagactttgtggtggttgctgacttgatcaaggaaggtgtggagataacaatggaagccaagaagctggtttcaggaacaaagcttggagagttcaccaagcttgtgacatctcctgagttcccattgagagagaaagtggagactctcaaggagagaggcgaatcattcacccatcgtttccccattcctggagtgtga

SEQ ID NO: 10702 - protein, 529 aa, Brassica napus
MQACCGGTSMGSLQQPVRVQRPVFAPITSPVTKFSQQLKLSFPRPCPSLFLRKSSVFERRASSVSAPDVETTSNEIPFEDYGRREVDPEVDEIITKEKNRQFRSLELIASENFTSRAVMETVGSCLTNKYSEGLPGKRYYGGNEFIDQLETLCQNRALATFRLDSTKWGANDQPLSGSPANFAVYTAILKPHDRIMGLDLPHGGHLSHGFMTAKRRVSGTSIYFESMPYRLDESTGIVDYDMLEKTAVLFRPKLIIAGASAYSRDFDYPRMRKIADSVGAFLMMDMAHISGLVAASVVADPFEYCDIVTTTTHKSLRGPRGGMIFFKKDPVNGVELESAINNAVFPGLQGGPHNHTIGGLAVCLKHAQSPEFKAYQKRVVANCRALANRLVELGFKLVSGGSDNHLVLVDLRPLGMDGARVEKILDMASITLNKNSVPGDKSALVPGGIRIGTPAMTTRGLSEKDFVVVADLIKEGVEITMEAKKLVSGTKLGEFTKLVTSPEFPLREKVETLKERGESFTHRFPIPGV

SEQ ID NO: 10703 - DNA, 1416 bp, Glycine max
  CDS (1)..(1416)
atggatccagtaagcgtgtggggtaacacgcccttggcgacggtggatcccgagatccatgacctcatcgagaaggagaagcgccgtcaatgccgcggaatcgagctcatcgcctccgagaacttcacctccttcgccgtcatcgaggccctcggcagcgctctcacgaacaaatactccgagggcatgccgggcaaccgctactacggcggcaatgaatacatcgaccagatcgaaaacctctgccgctcacgcgccctccaagccttccacctcgacgcccaatcctggggcgtcaacgtccagccctactccggctcccctgccaacttcgccgcctacaccgccgtcctcaacccccacgaccgcatcatggggctggatctcccctccggcggccacctcacccacggctactacacctccggcggcaagaagatctccgccacctccatttacttcgagagcctcccttacaaagtaaactccaccaccggctacatcgactacgaccgcttggaggaaaaagccctagacttcaggcccaaattgataatctgcggtggcagcgcttaccctcgcgattgggactacaaacgcttcagggaaattgcggataagtgcggggcattgcttctctgcgacatggcgcacactagcggccttgtggccgcgcaggaagtgaacagccccttcgagtattgcgacattgtgaccaccaccacgcataagagcttgcggggtccacgggcggggatgatcttttaccggaagggcccgaagccgccgaagaaggggcagccggagaacgcggtttatgatttcgaggacaagatcaactttgcggtgttcccttcgctgcagggtgggccccacaaccaccagatcggggctcttgccgtggcgctgaagcaggccgcgtcgcccgggtttaaggcctacgccaagcaggttaaggccaacgccgttgcgcttgggaattacttgatggggaaagggtacagtcttgtcactggaggcacggagaaccatcttgtcttgtgggatctcagacctcttggattgactgggaataaggtggagaaactctgtgatctctgcaacattactgttaataagaacgcagtttttggtgatagcagtgccttggcccccggtggagtgcgaattggggcccctgccatgacttctaggggtttggttgaaaaggactttgagcagattggtgagttccttcaccgtgctgtgactctcacactggagatccagaaggagcatggcaaacttctcaaggatttcaacaagggcctcgtcaacaacaaggccattgaagatctcaaagctgatgttgagaagttctctgccacatttgacatgcctggcttcctggtatctgaaatgaagtacaaggattag

SEQ ID NO: 10704 - protein, 471 aa, Glycine max
MDPVSVWGNTPLATVDPEIHDLIEKEKRRQCRGIELIASENFTSFAVIEALGSALTNKYSEGMPGNRYYGGNEYIDQIENLCRSRALQAFHLDAQSWGVNVQPYSGSPANFAAYTAVLNPHDRIMGLDLPSGGHLTHGYYTSGGKKISATSIYFESLPYKVNSTTGYIDYDRLEEKALDFRPKLIICGGSAYPRDWDYKRFREIADKCGALLLCDMAHTSGLVAAQEVNSPFEYCDIVTTTTHKSLRGPRAGMIFYRKGPKPPKKGQPENAVYDFEDKINFAVFPSLQGGPHNHQIGALAVALKQAASPGFKAYAKQVKANAVALGNYLMGKGYSLVTGGTENHLVLWDLRPLGLTGNKVEKLCDLCNITVNKNAVFGDSSALAPGGVRIGAPAMTSRGLVEKDFEQIGEFLHRAVTLTLEIQKEHGKLLKDFNKGLVNNKAIEDLKADVEKFSATFDMPGFLVSEMKYKD

SEQ ID NO: 10705 - DNA, 1416 bp, Helianthus annuus
  CDS (1)..(1416)
atggatccggtgaacgtttggggcaacacccccttagacgccgccgacccagagatcttcgacctaattgaacacgaaaaacgacgacaatctcgcgggatcgaactgattgcatccgaaaacttcacctcatttgcagtcatccaagctttgggatcccccttgaccaacaaatactccgagggcatgcctggaaaccgttactacggtggcaacgagtacatcgaccagatcgaaaacctctgccgttctcgcgccttacaggcttaccgtctagatcccaccaaatggggtgttaatgtccagccctattctggatctcctgccaattttgctgcctatacagccctcttagagccccatgatcggatcatgggccttgatttgccatcaggtgggcatttgacgcatggatattatacttccggtgggaagaagatatcagctacctcgatttactttgagagtttgccgtataaagtgaattcgactacgggatatatcgattacgagaagatggaggagaaggccttggactttagacccaagttgattatttgtggggggagtgcgtacccgagagattgggattacaagaggatcaggggcattgctgataaatgtggggccctcatgttgtgtgatatggctcatatcagtggccttgttgctgcacaggaagctgcagatccgttcgaatactgtgacgtggtcactaccaccacccacaagagtctcaggggaccaagagctggtatgatcttctaccgcaaaggtccaaaaccaccgaagaagggtcagccagaagatgctgtttatgactttgaagacaagatcaattttgctgtgttcccggctctgcaaggtgggccgcacaaccaccagattggtgctctagcggttgcgttgaaacaggccatgtcacctggattcaaggcatatgctaagcaagttagagccaatgctgttgcacttggtaactacttgatgagcaaagactacaagcttgtgaccggtggaactgaaaaccatcttgtgttgtgggatcttcgtcctcttggcttgaccgggaacaaggtggagaagctttgcgatcttgcaaacatcactgttaacaagaatgctgtgtttggtgacagcagtgctttggccccaggaggtgttcgtattggtacacctgcaatgacctcaaggggtttagttgagaaggattttgagcaaattggggagtttcttcaccgtgcaattcaaatcactttaagcatccagaaggagttcgggaaattattgaaggatttcaacaagggtttggtgaacaacaaggagatcgaacaactcaaggctgatgtcgagaagttttctggttcgtttgacatgcctgggttctcgttggccgacatgaagtataaggattga

SEQ ID NO: 10706 - protein, 471 aa, Helianthus annuus
MDPVNVWGNTPLDAADPEIFDLIEHEKRRQSRGIELIASENFTSFAVIQALGSPLTNKYSEGMPGNRYYGGNEYIDQIENLCRSRALQAYRLDPTKWGVNVQPYSGSPANFAAYTALLEPHDRIMGLDLPSGGHLTHGYYTSGGKKISATSIYFESLPYKVNSTTGYIDYEKMEEKALDFRPKLIICGGSAYPRDWDYKRIRGIADKCGALMLCDMAHISGLVAAQEAADPFEYCDVVTTTTHKSLRGPRAGMIFYRKGPKPPKKGQPEDAVYDFEDKINFAVFPALQGGPHNHQIGALAVALKQAMSPGFKAYAKQVRANAVALGNYLMSKDYKLVTGGTENHLVLWDLRPLGLTGNKVEKLCDLANITVNKNAVFGDSSALAPGGVRIGTPAMTSRGLVEKDFEQIGEFLHRAIQITLSIQKEFGKLLKDFNKGLVNNKEIEQLKADVEKFSGSFDMPGFSLADMKYKD

SEQ ID NO: 10707 - DNA, 1416 bp, Hordeum vulgare
  CDS (1)..(1416)
atggacgccgtggccgactgggggctcaccccgctcgcggaggccgacccggaggtgtacgacctcatcgagcgcgagaagcggcgccagcgcacgggcatcgagctaatcgcgtccgagaacttcacctcgctcgccgtcatgcaggcgctcggctccccgctcaccaacaagtactccgagggcatgcctggggcgcgctactacggcgggaacgaggtcatcgacgaggtcgaggagctctgccgcgcccgcgccctcaaggcgttccacctcgaccccgcctcctggggcgtcaacgtgcagccctactccggctcccccgccaacttcgccgcctacactgggctgctccaaccccacgagcgaatcatggggctcgatttgccgtccggaggacacctcactcatgggtactacacggccgggggcaagaagatttctgccacctctatctacttttcgagcttgccctacaaggtgagctccgacaccgggtacgtcgactatgataggctggaggagaaggccatggatttccgccccaagctcattatctgtggcgggagcgcgtacccacgggactgggattatgccaggcttagggccatcgcggacaagtgtggggccatgttgctgtgtgacatggcccatatcagcggtctcgttgctgctcaggaggctacgaatccgtttgagtactctgatgtggttaccaccaccacccacaagagtctccgagggccaaggtctggtatgatattctacaggaagggcccgaagcctcccaaaaaaggccagcccgagggtgctctgtacgattatgaggacaagatcaactttgcagtgtttccatcacttcagggcggccctcacaaccaccagattgctgccctggcagttggcctgaagcaggccatgttacctggattcaaggcatatattcagcaggtcaaggtcaatgctgttgcccttggaaaccatctcatgagtaagggctacaagttggttactgatggaacagagaaccaccttgttctctgggatcttcgccctcttggcttgtctggtaacaaagtcgagaaagtatgtgatctgagcagcattacactcaacaaaaatgctgtctttggtgacagcagtgcattggcacctggtggtgtccgaattggtacacctgccatgacctcgagaggtttggtcgagaaggacttcgtgaagattgctgagtaccttcatcaggctgtggtcatctgcttgaatgtccagaagcagcgaggcaagcgttacaatgatttcattgttgacttggagaagaacgaggacatagcggagctcagggcagaggtcgagaagtttgccatttcatttgagatgcctggcttcctggtgtcagacatgaaatacaaggattag

SEQ ID NO: 10708 - protein, 471 aa, Hordeum vulgare
MDAVADWGLTPLAEADPEVYDLIEREKRRQRTGIELIASENFTSLAVMQALGSPLTNKYSEGMPGARYYGGNEVIDEVEELCRARALKAFHLDPASWGVNVQPYSGSPANFAAYTGLLQPHERIMGLDLPSGGHLTHGYYTAGGKKISATSIYFSSLPYKVSSDTGYVDYDRLEEKAMDFRPKLIICGGSAYPRDWDYARLRAIADKCGAMLLCDMAHISGLVAAQEATNPFEYSDVVTTTTHKSLRGPRSGMIFYRKGPKPPKKGQPEGALYDYEDKINFAVFPSLQGGPHNHQIAALAVGLKQAMLPGFKAYIQQVKVNAVALGNHLMSKGYKLVTDGTENHLVLWDLRPLGLSGNKVEKVCDLSSITLNKNAVFGDSSALAPGGVRIGTPAMTSRGLVEKDFVKIAEYLHQAVVICLNVQKQRGKRYNDFIVDLEKNEDIAELRAEVEKFAISFEMPGFLVSDMKYKD

SEQ ID NO: 10709 - DNA, 1416 bp, Hordeum vulgare
  CDS (1)..(1416)
atggactccgtcgcgtcgtgggggctgacgccgctggcggacgcggacccggacgtcttcgacctcatcgagcgggagaagcggcgccagcggagcgggatcgagctcatcgcgtcggagaacttcacctccttcgccgtcatcgaggcgctcggctcggccctcaccaacaagtactccgagggcatgccgggggcccgctactacggcggcaacgacgtcatcgacgagatcgagaacctctgccgcgaccgcgccctcgccgccttccgcctcgacgccgcctcctggggcgtcaacgtgcagccctactccggctcgcccgccaacttcgccgcctacaccgcgctcctcaacccgcacgaccggatcatggggctcgacctcccctccggcggacacctcacccacggctactacaccgccggggggaagaagatctccgccacctccatctacttcgagagcctgccctacaaggtcagcgccgccaacggctacatcgactacgacaagctcgaggagaaggccatggacttccgccccaagctcatcatctgcggtggcagcgcctaccccagggactgggactacgccaagctcagggccatcgccgacaagatcggggccatgctcctctgcgacatggcgcacatcagcgggctggtcgccgcgcaggaagctgcaaatccttttgagttctgtgatgtggttaccaccacaacacacaagtccctccgaggaccaagggctggcatgatcttctacaggaaaggccctaagcctgcgaagaagggccagcctgagggtgctgtgtatgactacgaggacaagatcaactttgcggtgttcccatcgctccagggtggtcctcacaaccaccaaattgctgcccttgcagttgccctgaagcaaactttgacacctggattcaaggcctacgcaaagcaggtcaaggccaacgctgttgccgttggaaagtatctcatgagcaagggctacaagatggtgaccgatggaactgacaaccaccttgttctatgggatctccgccctcttggcttgactggaaacaaggtcgaaaagatgtgtgacctttgtagcattacattgaacaagaatgctgtcttcggtgacagcagtgcattgtccccgggtggtgtccgcattggtgctcctgctatgacctccaggggtctggttgagaaggacttcgagcagatcgccgagttcctccaccaggcagtgaccatctgcctgaacatccagaaggagcacgggaagctgctcaaggacttctccaagggcctggtgaacaacaaggacattgagaacctcaaggtcgaggtcgagaagtttgccctctcctttgacatgcccggcttcacgctcgagagcatgaagtacaaggagtag

SEQ ID NO: 10710 - protein, 471 aa, Hordeum vulgare
MDSVASWGLTPLADADPDVFDLIEREKRRQRSGIELIASENFTSFAVIEALGSALTNKYSEGMPGARYYGGNDVIDEIENLCRDRALAAFRLDAASWGVNVQPYSGSPANFAAYTALLNPHDRIMGLDLPSGGHLTHGYYTAGGKKISATSIYFESLPYKVSAANGYIDYDKLEEKAMDFRPKLIICGGSAYPRDWDYAKLRAIADKIGAMLLCDMAHISGLVAAQEAANPFEFCDVVTTTTHKSLRGPRAGMIFYRKGPKPAKKGQPEGAVYDYEDKINFAVFPSLQGGPHNHQIAALAVALKQTLTPGFKAYAKQVKANAVAVGKYLMSKGYKMVTDGTDNHLVLWDLRPLGLTGNKVEKMCDLCSITLNKNAVFGDSSALSPGGVRIGAPAMTSRGLVEKDFEQIAEFLHQAVTICLNIQKEHGKLLKDFSKGLVNNKDIENLKVEVEKFALSFDMPGFTLESMKYKE

SEQ ID NO: 10711 - DNA, 1416 bp, Oryza sativa
  CDS (1)..(1416)
atggactccgtcgcgtcgtgggggctgaccccgctcgccgcggccgacccgctcgtccacgacctcctcgagcgggagaagcggcggcagcggagcggcatcgagctcatcgcctcggagaacttcacctccttcgccgtcatggaggccctcggctccgcgctcaccaacaagtactccgaggggatgcccggggcgcgctactacggcgggaacgatgtcatcgacgagatcgagaacctgtgccgcgaccgcgccctcgccgcgttccgcctcgacgccgcgtcgtggggcgtcaacgtgcagccctactccggctcgccggccaacttcgccgcctacacggcgctcctcaacccgcacgaccgcatcatggggctcgacctcccctccggtggccacctcacccatggctactacaccgcgggcgggaagaagatctccgcgacgtcgatctacttcgagagcctcccctacaaggtgagcgccgccacggggtacatcgactacgagaagctggaggagaaggcgctcgacttccgccccaagctcatcatctgcggcggcagcgcgtacccgagggactgggactacgccaagctcagggccgtcgccgacaaggtcggggcgctgctcctctgcgacatggcgcacatcagcggcctcgtcgccgcgcaggaagctgcaaatcctttcgagtactgtgatgtggttaccaccaccacgcacaagtccctccgaggaccaagagctggcatgatcttctacaggaagggccctaagcctcccaagaagggccagcctgagggtgctgtctatgactacgaggacaagatcaacttcgcagtgttcccgtcactgcaaggtggccctcacaaccaccagattgcagcccttgctgttgctctgcagcaaaccatgacacctggattcaaggcctacgcaaagcaggtcaaggccaacgctgtcgccattggcaagtatcttatgagcaagggctacaaaatggtgactgatggaactgagaaccaccttgttctctgggatcttcgccctcttggcttgactggcaacaaggttgagaagatgtgtgacctttgcagcattacacttaacaagaatgctgtctttggtgacagcagtgcattggctcctggcggtgtccgcattggtactcctgcgatgacatccaggggtcttgtcgagaaggactttgagcagatcggcgagttcctccaccaggccgtgaccatctgcctcaacatccagaaggagcacggcaagctcctcaaggacttctccaagggcctggtgaacaacaaggacatcgagaacctcaagctggaggtcgagaagttcgccacctccttcgacatgcccggcttcaccctcgacagcatgaagtacaaggagtag

SEQ ID NO: 10712 - protein, 471 aa, Oryza sativa
MDSVASWGLTPLAAADPLVHDLLEREKRRQRSGIELIASENFTSFAVMEALGSALTNKYSEGMPGARYYGGNDVIDEIENLCRDRALAAFRLDAASWGVNVQPYSGSPANFAAYTALLNPHDRIMGLDLPSGGHLTHGYYTAGGKKISATSIYFESLPYKVSAATGYIDYEKLEEKALDFRPKLIICGGSAYPRDWDYAKLRAVADKVGALLLCDMAHISGLVAAQEAANPFEYCDVVTTTTHKSLRGPRAGMIFYRKGPKPPKKGQPEGAVYDYEDKINFAVFPSLQGGPHNHQIAALAVALQQTMTPGFKAYAKQVKANAVAIGKYLMSKGYKMVTDGTENHLVLWDLRPLGLTGNKVEKMCDLCSITLNKNAVFGDSSALAPGGVRIGTPAMTSRGLVEKDFEQIGEFLHQAVTICLNIQKEHGKLLKDFSKGLVNNKDIENLKLEVEKFATSFDMPGFTLDSMKYKE

SEQ ID NO: 10713 - DNA, 1416 bp, Oryza sativa
  CDS (1)..(1416)
atggacgccgtggccgactgggggctgaccactctggaggaggctgacccggaggtgtacgacctcgtcgagcgcgagaagcggcggcagcgcgcgggcgtcgagctcatcgcgtcggagaacttcacctcgctcgccgtcatggaggcgctgggctcgccgctcaccaacaagtactccgagggcatgccgggggcccgctactacggaggcaacgaggtcatcgacgaggtggaggagctctgccgcgcccgcgcgctcgccgcgttccacctcgaccccgaggcctggggcgtcaacgtgcagccctactccggctcgccggcgaacttcgccgcctacaccgggctgctccaaccccacgagcggatcatggggctcgatttgccgtccggcggccacctcacgcacggctactacaccgccggcggcaaaaagatctccgccacgtccatctacttcgagagcctgccgtacaaggtgagctccgagacaggatacgtcgattatgataagctggaggagaaggccatggattttcggcccaagctcatcatctgcggcgggagcgcgtacccgcgggattgggattacgccaggttcagggccatcgcggataagtgcggcgccatgttgctctgcgacatggctcacatcagtggcctagttgccgcgcaggaggctgcaaatccttttcaatattctgatgtggttaccaccaccacccacaagagtctccgagggccaagatctggtatgatcttctacaggaagggcctgaagcctcccaagaaaggccagcctgagggcgctctgtatgactacgaggacaggatcaacttcgcagtgtttccgtcgctccaagggggccctcacaaccaccaaattgctgcgctagcggttggtttgaagcagactatgtcacctggattcaagtcttatattaagcaggtcaaggccaatgctgttgcccttggtaaccatttgatgagtaagggctacaaattggttactgacggaacagagaaccatcttgttctctgggatctgcgccctcttggcttgactggtaacaaagttgagaaggtctgtgatttgtgcagcattacactgaacaaaaatgctgtctttggggatagcagtgcaatgtcacctggtggtgtccgcattggtacacctgccatgacatcaaggggtttggtagaggaggactttgtacagatcgccgagttccttcaccaggcagtgaccatctgcttggatgttcagaaggagcgtggcaagcttctcaagtacttcaacgagggcctggagaacaacaaggacattgaggacctcagggcggaggtggagaagtttgccacttcattcgagatgcctggcttcagggtatccgacatgaagtacaaggattag

SEQ ID NO: 10714 - protein, 471 aa, Oryza sativa
MDAVADWGLTTLEEADPEVYDLVEREKRRQRAGVELIASENFTSLAVMEALGSPLTNKYSEGMPGARYYGGNEVIDEVEELCRARALAAFHLDPEAWGVNVQPYSGSPANFAAYTGLLQPHERIMGLDLPSGGHLTHGYYTAGGKKISATSIYFESLPYKVSSETGYVDYDKLEEKAMDFRPKLIICGGSAYPRDWDYARFRAIADKCGAMLLCDMAHISGLVAAQEAANPFQYSDVVTTTTHKSLRGPRSGMIFYRKGLKPPKKGQPEGALYDYEDRINFAVFPSLQGGPHNHQIAALAVGLKQTMSPGFKSYIKQVKANAVALGNHLMSKGYKLVTDGTENHLVLWDLRPLGLTGNKVEKVCDLCSITLNKNAVFGDSSAMSPGGVRIGTPAMTSRGLVEEDFVQIAEFLHQAVTICLDVQKERGKLLKYFNEGLENNKDIEDLRAEVEKFATSFEMPGFRVSDMKYKD

SEQ ID NO: 10715 - DNA, 1767 bp, Zea mays
  CDS (1)..(1767)
atggatctctcgcggcccacatcgtcggacctctcgctcgggctccactctcacggtcacgcccacgcccacgctcgcaggcacgcggtagccgcgccgctgcgcctgttcgacgacgcggaggagccgaagccggagcgcgtcgtggccggagaggccgacgcggagagggatgacgaggacgggggcgaccagcacttctccctcctcgggcactccctcttcgtcaagcgcccgcgccgcgccggcaacggcggcgggggcggagagacgtcatcctgctcgtccacgtccgcggcgcttcgccctgccaagcgacaggcgacgggggagggcagcggcgcagatctggagacccgccgcgccgcggtccgcgcctggggcaatcagtcgctggcggaggccgacccggacgtgcactcgctgatggagcaggagttggaccgccaggtgcgaggcatcgagctcatagcgtcggaaaacttcgtctgccgcgcggtgctcgatgcactcggcagccacctcactaacaagtactccgagggggccccgggtgctcgctactacggcgggaatcagcacatcgacgccatcgaacggctctgccatgagcgcgctctcaccgccttcggtctcgaccctgcctgctggggcgtcaacgtgcagccctactcgtgcacgtctgccaacttggctgtctacactgggctccttcaacccaaggaccgcatcatggggctggagccaccgtcgggcggccatgttagccatggttactacacgcccagtggcaagaaggtgtcaggtgcctctattttcttcgagagcatgtcgtacaaggtgaacccacagactgggtatattgattacgacaagcttgaagaaagagcaatggatttccaccctaaaattctcatctgtggtgggagctcttaccccagagagtgggactttgcacggatgagattgattgctgataagtgtggtgcggtgcttctttgcgacatggcacatatcagtgggcttgtcgcagcaaaggaatgccgtagccctttcgactactgtgatgttgttacgtcaactactcacaagaatcttaggggccctagaggtggtataatattcttcaggaaagggaaaaatttaaggaaacgagctggatctttttctcaaggagatgagaatgaatatgacttcgaggataggataaattttggtgttttcccttcaatgcaaggagggccccataataatcatattgctggcttggctataactctgaagcaggtagcaacttctgaatataaagcatacattcaacaagtcaagaaaaatgctcaggctttggcatcagctttgatcagaagaaaatgcagattggttacaggtggcacagataatcacttggtactttgggacctcagaactcttggcttgactggcaagatcttcgagaaggtttgtgaggcatgccacatatctgtcaacaagacaccaatttatggagataatggctcgatatcgccaggtggtgtgcggattggaacacctgcaatgactactagaggttgcttagaagaggacttcgaggtgattgcagacttcctcataagggctactcaaattgctaacaatgttctgaaagaacatggcaaagtgcaaaaggagtttctaagaggcctacagaacaataatgatgttatagaactccgaaatcaggttgaggcatttgcgtcacagtttgcgatgccaggttttgatgtatga

SEQ ID NO: 10716 - protein, 588 aa, Zea mays
MDLSRPTSSDLSLGLHSHGHAHAHARRHAVAAPLRLFDDAEEPKPERVVAGEADAERDDEDGGDQHFSLLGHSLFVKRPRRAGNGGGGGETSSCSSTSAALRPAKRQATGEGSGADLETRRAAVRAWGNQSLAEADPDVHSLMEQELDRQVRGIELIASENFVCRAVLDALGSHLTNKYSEGAPGARYYGGNQHIDAIERLCHERALTAFGLDPACWGVNVQPYSCTSANLAVYTGLLQPKDRIMGLEPPSGGHVSHGYYTPSGKKVSGASIFFESMSYKVNPQTGYIDYDKLEERAMDFHPKILICGGSSYPREWDFARMRLIADKCGAVLLCDMAHISGLVAAKECRSPFDYCDVVTSTTHKNLRGPRGGIIFFRKGKNLRKRAGSFSQGDENEYDFEDRINFGVFPSMQGGPHNNHIAGLAITLKQVATSEYKAYIQQVKKNAQALASALIRRKCRLVTGGTDNHLVLWDLRTLGLTGKIFEKVCEACHISVNKTPIYGDNGSISPGGVRIGTPAMTTRGCLEEDFEVIADFLIRATQIANNVLKEHGKVQKEFLRGLQNNNDVIELRNQVEAFASQFAMPGFDV

SEQ ID NO: 10717 - DNA, 1416 bp, Triticum aestivum
  CDS (1)..(1416)
atggacgccgtggccgactgggggctcaccccgctcgcggaggccgacccggaggtgtacgacctcatcgagcgcgagaagcggcgccagcgcacgggcatcgagctaatcgcgtccgagaacttcacctcgctcgccgtcatggaggcgctcggctccccgctcaccaacaagtactccgagggcatgcccggggcgcgctactacggcgggaacgaggtcatcgacgaggtcgaggagctctgccgcgcccgcgccctcaaggcgttccacctcgaccccgcctcctggggcgtcaacgtgcagccctactccggctcccccgccaacttcgccgcctacactgggctgctccaaccccacgagcgcatcatggggctcgatctgccgtccggaggacacctcactcatgggtactacacggccgggggcaagaagatttctgccacctccatttacttttcgagcttgccctacaaggtgagctccgacaccgggtacgtcgactatgataggctggaggagaaggccatggatttccgccccaagctcattatctgtggcgggagcgcgtacccacgggactgggattatgccaggcttagggccatcgcggacaagtgcggggccatgttgctgtgtgacatggctcatatcagcggtctcgttgccgctcaggaggctacgaatccgtttgagtattctgatgtggttaccaccaccacccacaagagtctccgagggccaaggtctggtatgatattctacaggaagggcccgaagcctcccaaaaaaggccagcccgagggtgctctttacgattacgaggacaagatcaactttgcagtgtttccatcactccagggtggccctcacaaccaccagattgctgccctggcagttggcctgaagcaggcaatgtcacctggattcaaggcatatattcagcaggtcaaggccaatgctgttgcccttggaaaccagctgatgaggaagggctacaagttggttacggatggaacagagaaccaccttgttctctgggatcttcgccctcttggcttgtctggcaacaaagttgagaaagtatgcgatctgagcagcattacactcaacaaaaatgccgtctttggtgacagcagtgcattggcacctggtggtgtccgaattggtacacctgccatgacctcgagaggtttggtcgagaaggactttgtgaagattgctgagtaccttcatcaggctgtggtcatctgcttgaatgtccagaagcagcgaggtaagcgttacaatgatttcatcgttgacttggagaagaacgaggacatcgcggagctcagggcagaggtcgagaagtttgccattgcatttgagatgcctggcttccgggtgtcagacatgaaatacaaggattag

SEQ ID NO: 10718 - protein, 471 aa, Triticum aestivum
MDAVADWGLTPLAEADPEVYDLIEREKRRQRTGIELIASENFTSLAVMEALGSPLTNKYSEGMPGARYYGGNEVIDEVEELCRARALKAFHLDPASWGVNVQPYSGSPANFAAYTGLLQPHERIMGLDLPSGGHLTHGYYTAGGKKISATSIYFSSLPYKVSSDTGYVDYDRLEEKAMDFRPKLIICGGSAYPRDWDYARLRAIADKCGAMLLCDMAHISGLVAAQEATNPFEYSDVVTTTTHKSLRGPRSGMIFYRKGPKPPKKGQPEGALYDYEDKINFAVFPSLQGGPHNHQIAALAVGLKQAMSPGFKAYIQQVKANAVALGNQLMRKGYKLVTDGTENHLVLWDLRPLGLSGNKVEKVCDLSSITLNKNAVFGDSSALAPGGVRIGTPAMTSRGLVEKDFVKIAEYLHQAVVICLNVQKQRGKRYNDFIVDLEKNEDIAELRAEVEKFAIAFEMPGFRVSDMKYKD

SEQ ID NO: 10719 - DNA, 1416 bp, Zea mays
  CDS (1)..(1416)
atggacaacgtggaggagtgggggctgaggccgctggccgaggtcgacccggaggtgtacgacctaatcgagcgcgagaagcggcggcagcgagcgggtatcgagctcatcgcatcggagaacttcacctcgctcgctgtcatggaggcgctgggctccccgctcaccaacaagtactcggagggcatgccgggggcgcgctactacggcggcaacgaggtcatcgacgaaatcgaggagctctgccggacccgcgcgctcgccgccttccacctcgaccccgcccgctggggcgtcaacgtgcagccctactcggggtcccccgccaatttcgcggcatacacggggctgctccagccgaacgacaggatcatggggctcgacctgccgtccgggggccacctcacccacgggtactacacggcgagtggaaagaagatttctgcaacctccatctacttccagagcctgcccgataaggggagctccgacaccgggtacgtcgactacgataagctggaggaaaaggccatggatttccgccccaagcttatcatctgtggcggtagtgcatgccctcgggagtgggattacgccaggttcagggccatcgcagacaagtgcggggccatgttgctctgcgacatggctcatatcagtggtctcgttgctgcgcaggaggctttgaatccttttgaattctctgatgtggttaccactacgacccacaaaagtcttcgagggccaaggtctggtatgattttctacaggaagggcccaaagcctccaaaaaaaggccagcctgagggtgctctgtatgactacgaggacaagatcaactttgctgtgttcccgtcactccagggggggcctcacaatcaccaaattgctgctctagctgtagccttgaaacaggccatgtcacctggattcaaggcctatatccagcaggtcaaggcaaacacagtttcccttggtaaccatttgatgagtaagggctacaagttggttactgatggaacagagaaccaccttgttctctgggatctgcgccctcttggcttgactggcaataaagttgagatgctatgtgacctatgcaacattacactgaacaaaaatgctgtctttggtgacagcagtgcattatcacctggcggtgtgcgcattggtacacctgctatgacctcaaggggtttggttgagaaggacttcgtgcagattgccgagtaccttcaccgagctgtgaccatctgcttgagcatccaggcggagcatggcaagattctcaaggacttcaagaagggcttggtgcaaaacaaggacatagagaacctgagggcggaggtcgagaagttcgccacttcatttgacatgcctggcttcagggtgtctgacatgaagtacacagactag

SEQ ID NO: 10720 - protein, 471 aa, Zea mays
MDNVEEWGLRPLAEVDPEVYDLIEREKRRQRAGIELIASENFTSLAVMEALGSPLTNKYSEGMPGARYYGGNEVIDEIEELCRTRALAAFHLDPARWGVNVQPYSGSPANFAAYTGLLQPNDRIMGLDLPSGGHLTHGYYTASGKKISATSIYFQSLPDKGSSDTGYVDYDKLEEKAMDFRPKLIICGGSACPREWDYARFRAIADKCGAMLLCDMAHISGLVAAQEALNPFEFSDVVTTTTHKSLRGPRSGMIFYRKGPKPPKKGQPEGALYDYEDKINFAVFPSLQGGPHNHQIAALAVALKQAMSPGFKAYIQQVKANTVSLGNHLMSKGYKLVTDGTENHLVLWDLRPLGLTGNKVEMLCDLCNITLNKNAVFGDSSALSPGGVRIGTPAMTSRGLVEKDFVQIAEYLHRAVTICLSIQAEHGKILKDFKKGLVQNKDIENLRAEVEKFATSFDMPGFRVSDMKYTD

SEQ ID NO: 10721 - DNA, 1581 bp, Zea mays
  CDS (1)..(1581)
atgtgcacacgcgcccacctcccgtccaccaccgctatatatcccggcgccccttcctccctcccccgtccttccctccgcctccgcctccgcccccgcccccgcccacgcccactcctcgctgccaccactcctgtcacctcttcccgcgccgacgcagccgccatggaccccgtcgccacatgggggctaaccccgctcgcgggcgccgacccggagatctacgacctcctggagcgcgagaagcggcgccagcgtcgcggcatcgagctcatcgcctccgagaacttcacctccttcgccgtcatggaggcgctcggctccgcgctcactaacaagtactccgagggcatgcccggcgcccgctactacggcggcaacgacgtcatcgacgagatcgagaacctctgccggtcacgcgcgctcgctgccttccaccttgacgccgcgtcctggggcgtcaacgtgcagccctactcgggctcccccgccaacttcgccgcctacaccgcgctgctcaacccgcacgaccggatcatggggctcgaccttccctccggcggacacctcactcacgggtactacacggccggcggtaagaagatctccgccacctcgatctactttgagagcctgccgtacaaggtgagcgccgcaacggggtacatcgactacgagaagctcgaggagaaggcacttgacttccgccccaagctcatcatctgcggtggcagtgcgtacccgagggactgggattacgccaagctcagggccgtcgccgacaaggtcggggccctgctgctctgcgacatggcgcacatcagcgggctcgtcgccgcgcaggaagctgcaaatccttttgaatattgtgatgtggttaccacaaccacgcacaagtccctcagagggccaagggctggcatgatcttctacaggaaaggccctaagccccccaagaagggccagcctgagggtgctgtttatgattacgaagacaagatcaactttgcagtgttcccatctctccaaggtggccctcacaaccaccagattgctgcacttgctgttgctctacagcaaactatgtcgcctggcttcaaggcctatgcaaagcaagtgaaggccaatgctgttgcaattggaaactatctcatgagcaagggctacaagatggtgactgatggaactgagaaccaccttgttctctgggatctccgcccccttggcttgactggaaacaaggtcgaaaagctatgtgatctttgccacatcacattgaacaagaatgctgtcttcggtgacagcagtgcattgtctccgggtggtgtccgcattggcgcgccagcaatgacctcgaggggtctactggagaaggatttcgagcagattggggagttcctccaccaggcagtgaccatctgcctgaacatccagaaggagtacggcaagctcctcaaggacttcaacaagggcctggtgaacaacaaggacatcgagaacctcaaggtccaggtggagaagtttgccgactccttcgacatgcctgggttcacgcttgagagcatgaaatacaaggagtag

SEQ ID NO: 10722 - protein, 526 aa, Zea mays
MCTRAHLPSTTAIYPGAPSSLPRPSLRLRLRPRPRPRPLLAATTPVTSSRADAAAMDPVATWGLTPLAGADPEIYDLLEREKRRQRRGIELIASENFTSFAVMEALGSALTNKYSEGMPGARYYGGNDVIDEIENLCRSRALAAFHLDAASWGVNVQPYSGSPANFAAYTALLNPHDRIMGLDLPSGGHLTHGYYTAGGKKISATSIYFESLPYKVSAATGYIDYEKLEEKALDFRPKLIICGGSAYPRDWDYAKLRAVADKVGALLLCDMAHISGLVAAQEAANPFEYCDVVTTTTHKSLRGPRAGMIFYRKGPKPPKKGQPEGAVYDYEDKINFAVFPSLQGGPHNHQIAALAVALQQTMSPGFKAYAKQVKANAVAIGNYLMSKGYKMVTDGTENHLVLWDLRPLGLTGNKVEKLCDLCHITLNKNAVFGDSSALSPGGVRIGAPAMTSRGLLEKDFEQIGEFLHQAVTICLNIQKEYGKLLKDFNKGLVNNKDIENLKVQVEKFADSFDMPGFTLESMKYKE

SEQ ID NO: 10723 - DNA, 1773 bp, Zea mays
  CDS (1)..(1773)
atggatctctcgcggcccacatcgtcagacctctcgctcgggctccactcgcacggtcacgcccacgcccacgctcgcaggcacgcggcagccgcgccgctgcgcctgttcgacgacgcggaggagccgaagccggagcgcctcggggccggagaggccgacgcggagagggacgacgaggacgggggcgaccagcacttctccctcctcgggcactccctctgcgtcaagcgcccgcgccgcgccggcaacggcggcgggggtgggggcggagagacgtcatcctgctcgtccacgtccccggcgctgcgccccgccaagcgacaggcgacgggggaagacagcggcgcagatctggagacccgccgcgccgcggtccgcgcctggggcaaccagtcgctggcggaggccgacccggacgtgcactcgctgatggagcaggagctggaccgccaggtgcgaggcatcgagctcatagcgtcggaaaacttcgtctgccgcgcggtgctcgatgcactcggcagccacctcaccaacaagtactccgagggggccccgggtgctcgctactacggcgggaatcagcacatcgacgccatcgaacggctctgccatgagcgcgccctcaccgccttcggtctcgaccctgcctgctggggcgtcaacgtgcagccctactcgtgcacgtctgccaacttggctgtctacactgggctccttcaacccaaggaccgcatcatggggctggagccaccgtcgggcggccatgttagccatggttactacacgcccagtggcaagaaggtgtcaggtgcctctattttcttcgagagcatgtcgtacaaggtgaacccacagactgggtatattgattacgacaagcttgaagaaagagcaatggatttccaccctaaaattctcatctgtggtgggagctcttaccccagagagtgggactttgcacggatgagattgattgctgataagtgtggtgcggtgcttctttgcgacatggcacatatcagtgggcttgtcgcagcaaaggaatgccgtagccctttcgactactgtgatgttgttacgtcaactactcacaagaatcttaggggccctagaggtggtataatattcttcaggaaagggaaaaatttaaggaaacgagctggatctttttctcaaggagatgagaatgaatacgacttcgaggataggataaattttggtgttttcccttcaatgcaaggagggccccataataatcatattgctggcttggctataactctgaagcaggtagcaacttctgaatataaagcatacattcaacaagtcaagaaaaatgctcaggctttggcatcagctttgatcagaagaaaatgcagatgggtaacaggtggcacagataatcacttagtactttgggacctcagaactcttggcttgactggcaagatcttcgagaaggtttgcgaggcatgccacatatctgtcaacaagacaccaatttatggagataatggctcgatatcgccaggtggtgtgcggattggaacacctgcaatgactactagaggttgcttagaagaggacttcgaggtgattgcagacttcctcataagggctactcaaattgctaacaatgttctgaaagaacatggcaaagtgcaaaaggagtttctaagaggcctacagaacaataatgatgttatagaactccgaaatcaggttgaggcatttgcgtcacagtttgcgatgccaggttttgatgtatga

SEQ ID NO: 10724 - protein, 590 aa, Zea mays
MDLSRPTSSDLSLGLHSHGHAHAHARRHAAAAPLRLFDDAEEPKPERLGAGEADAERDDEDGGDQHFSLLGHSLCVKRPRRAGNGGGGGGGETSSCSSTSPALRPAKRQATGEDSGADLETRRAAVRAWGNQSLAEADPDVHSLMEQELDRQVRGIELIASENFVCRAVLDALGSHLTNKYSEGAPGARYYGGNQHIDAIERLCHERALTAFGLDPACWGVNVQPYSCTSANLAVYTGLLQPKDRIMGLEPPSGGHVSHGYYTPSGKKVSGASIFFESMSYKVNPQTGYIDYDKLEERAMDFHPKILICGGSSYPREWDFARMRLIADKCGAVLLCDMAHISGLVAAKECRSPFDYCDVVTSTTHKNLRGPRGGIIFFRKGKNLRKRAGSFSQGDENEYDFEDRINFGVFPSMQGGPHNNHIAGLAITLKQVATSEYKAYIQQVKKNAQALASALIRRKCRWVTGGTDNHLVLWDLRTLGLTGKIFEKVCEACHISVNKTPIYGDNGSISPGGVRIGTPAMTTRGCLEEDFEVIADFLIRATQIANNVLKEHGKVQKEFLRGLQNNNDVIELRNQVEAFASQFAMPGFDV

SEQ ID NO: 10725 - DNA, 1767 bp, Zea mays
  CDS (1)..(1767)
atggatctctcgcggcccacatcgtcggacctctcgctcgggctccactctcacggtcacgcccacgcccacgctcgcaggcacgcggtagccgcgccgctgcgcctgttcgacgacgcggaggagccgaagccggagcgcgtcggggccggagaggccgacgcggagagggatgacgaggacgggggcgaccagcacttctccctcctcgggcactccctctgcgtcaagcgcccgcgccgcgccggcaacggcggcgggggcggagagacgtcatcctgctcgtccacgtccgcggcgcttcgccctgccaagcgacaggcgacgggggagggcagcggcgcagatctggagacccgccgcgccgcggtccgcgcctggggcaatcagtcgctggcggaggccgacccggacgtgcactcgctgatggagcaggagctggaccgccaggtgcgaggcatcgagctcatagcgtcggaaaacttcgtctgccgcgcggtgctcgatgcactcggcagccacctcactaacaagtactccgagggggccccgggtgctcgctactacggcgggaatcagcacatcgacgccatcgaacggctctgccatgagcgcgctctcaccgccttcggtctcgaccctgcctgctggggcgtcaacgtgcagccctactcgtgcacgtctgccaacttggctgtctacactgggctccttcaacccaaggaccgcatcatggggctggagccaccgtcgggcggccatgttagccatggttactacacgcccagtggcaagaaggtgtcaggtgcctctattttcttcgagagcatgtcgtacaaggtgaacccacagactgggtatattgattacgacaagcttgaagaaagagcaatggatttccaccctaaaattctcatctgtggtgggagctcttaccccagagagtgggactttgcacggatgagattgattgctgataagtgtggtgcggtgcttctttgcgacatggcacatatcagtgggcttgtcgcagcaaaggaatgccgtagccctttcgactactgtgatgttgttacgtcaactactcacaagaatcttaggggccctagaggtggtataatattcttcaggaaagggaaaaatttaaggaaacgagctggatctttttctcaaggagatgagaatgaatacgacttcgaggataggataaattttggtgttttcccttcaatgcaaggagggccccataataatcatattgctggcttggctataactctgaagcaggtagcaacttctgaatataaagcatacattcaacaagtcaagaaaaatgctcaggctttggcatcagctttgatcagaagaaaatgcagattggttacaggtggcacagataatcacttagtactttgggacctcagaactcttggcttgactggcaagatcttcgagaaggtttgcgaggcatgccacatatctgtcaacaagacaccaatttatggagataatggctcgatatcgccaggtggtgtgcggattggaacacctgcaatgactactagaggttgcttagaagaggacttcgaggtgattgcagacttcctcataagggctactcaaattgctaacaatgttctgaaagaacatggcaaagtgcaaaaggagtttctaagaggcctacagaacaataatgatgttatagaactccgaaatcaggttgaggcatttgcgtcacagtttgcgatgccaggttttgatgtatga

SEQ ID NO: 10726 - protein, 588 aa, Zea mays
MDLSRPTSSDLSLGLHSHGHAHAHARRHAVAAPLRLFDDAEEPKPERVGAGEADAERDDEDGGDQHFSLLGHSLCVKRPRRAGNGGGGGETSSCSSTSAALRPAKRQATGEGSGADLETRRAAVRAWGNQSLAEADPDVHSLMEQELDRQVRGIELIASENFVCRAVLDALGSHLTNKYSEGAPGARYYGGNQHIDAIERLCHERALTAFGLDPACWGVNVQPYSCTSANLAVYTGLLQPKDRIMGLEPPSGGHVSHGYYTPSGKKVSGASIFFESMSYKVNPQTGYIDYDKLEERAMDFHPKILICGGSSYPREWDFARMRLIADKCGAVLLCDMAHISGLVAAKECRSPFDYCDVVTSTTHKNLRGPRGGIIFFRKGKNLRKRAGSFSQGDENEYDFEDRINFGVFPSMQGGPHNNHIAGLAITLKQVATSEYKAYIQQVKKNAQALASALIRRKCRLVTGGTDNHLVLWDLRTLGLTGKIFEKVCEACHISVNKTPIYGDNGSISPGGVRIGTPAMTTRGCLEEDFEVIADFLIRATQIANNVLKEHGKVQKEFLRGLQNNNDVIELRNQVEAFASQFAMPGFDV

SEQ ID NO: 10727 - DNA, 22 bp, Artificial sequence
  primer
atggcgatggccatggctcttc

SEQ ID NO: 10728 - DNA, 20 bp, Artificial sequence
  primer
ttagttcttgtacttcatgg

SEQ ID NO: 10729 - protein, 479 aa, Artificial sequence
  consensus sequence
  Variant (2)..(3): Xaa in position 2 to 3 is any amino acid
  Variant (6)..(9): Xaa in position 6 to 9 is any amino acid
  Variant (17)..(18): Xaa in position 17 to 18 is any amino acid
  Variant (20)..(21): Xaa in position 20 to 21 is any amino acid
  Variant (23)..(24): Xaa in position 23 to 24 is any amino acid
  Variant (26)..(26): Xaa in position 26 is any amino acid
  Variant (29)..(30): Xaa in position 29 to 30 is any amino acid
  Variant (35)..(35): Xaa in position 35 is any amino acid
  Variant (41)..(41): Xaa in position 41 is any amino acid
  Variant (47)..(50): Xaa in position 47 to 50 is any amino acid
  Variant (52)..(53): Xaa in position 52 to 53 is any amino acid
  Variant (55)..(55): Xaa in position 55 is any amino acid
  Variant (57)..(59): Xaa in position 57 to 59 is any amino acid
  Variant (62)..(64): Xaa in position 62 to 64 is any amino acid
  Variant (66)..(70): Xaa in position 66 to 70 is any amino acid
  Variant (71)..(74): Xaa in position 71 to 74 is any or no amino acid
  Variant (79)..(79): Xaa in position 79 is any amino acid
  Variant (82)..(83): Xaa in position 82 to 83 is any amino acid
  Variant (84)..(85): Xaa in position 84 to 85 is any or no amino acid
  Variant (88)..(89): Xaa in position 88 to 89 is any amino acid
  Variant (91)..(96): Xaa in position 91 to 96 is any amino acid
  Variant (98)..(98): Xaa in position 98 is any amino acid
  Variant (99)..(99): Xaa in position 99 is any or no amino acid
  Variant (101)..(103): Xaa in position 101 to 103 is any amino acid
  Variant (105)..(106): Xaa in position 105 to 106 is any amino acid
  Variant (108)..(109): Xaa in position 108 to 109 is any amino acid
  Variant (114)..(114): Xaa in position 114 is any amino acid
  Variant (117)..(130): Xaa in position 117 to 130 is any amino acid
  Variant (131)..(136): Xaa in position 131 to 136 is any or no amino acid
  Variant (138)..(143): Xaa in position 138 to 143 is any amino acid
  Variant (144)..(145): Xaa in position 144 to 145 is any or no amino acid
  Variant (149)..(154): Xaa in position 149 to 154 is any amino acid
  Variant (156)..(159): Xaa in position 156 to 159 is any amino acid
  Variant (162)..(162): Xaa in position 162 is any amino acid
  Variant (164)..(165): Xaa in position 164 to 165 is any amino acid
  Variant (167)..(167): Xaa in position 167 is any amino acid
  Variant (171)..(174): Xaa in position 171 to 174 is any amino acid
  Variant (176)..(179): Xaa in position 176 to 179 is any amino acid
  Variant (181)..(181): Xaa in position 181 is any amino acid
  Variant (185)..(186): Xaa in position 185 to 186 is any amino acid
  Variant (189)..(189): Xaa in position 189 is any amino acid
  Variant (191)..(192): Xaa in position 191 to 192 is any amino acid
  Variant (197)..(198): Xaa in position 197 to 198 is any amino acid
  Variant (201)..(201): Xaa in position 201 is any amino acid
  Variant (204)..(208): Xaa in position 204 to 208 is any amino acid
  Variant (210)..(215): Xaa in position 210 to 215 is any amino acid
  Variant (216)..(216): Xaa in position 216 is any or no amino acid
  Variant (219)..(219): Xaa in position 219 is any amino acid
  Variant (224)..(224): Xaa in position 224 is any amino acid
  Variant (232)..(232): Xaa in position 232 is any amino acid
  Variant (234)..(237): Xaa in position 234 to 237 is any amino acid
  Variant (238)..(267): Xaa in position 238 to 267 is any or no amino acid
  Variant (271)..(271): Xaa in position 271 is any amino acid
  Variant (276)..(277): Xaa in position 276 to 277 is any amino acid
  Variant (279)..(279): Xaa in position 279 is any amino acid
  Variant (282)..(282): Xaa in position 282 is any amino acid
  Variant (283)..(283): Xaa in position 283 is any or no amino acid
  Variant (286)..(289): Xaa in position 286 to 289 is any amino acid
  Variant (291)..(294): Xaa in position 291 to 294 is any amino acid
  Variant (297)..(297): Xaa in position 297 is any amino acid
  Variant (299)..(300): Xaa in position 299 to 300 is any amino acid
  Variant (303)..(304): Xaa in position 303 to 304 is any amino acid
  Variant (307)..(320): Xaa in position 307 to 320 is any amino acid
  Variant (321)..(336): Xaa in position 321 to 336 is any or no amino acid
  Variant (338)..(338): Xaa in position 338 is any amino acid
  Variant (342)..(343): Xaa in position 342 to 343 is any amino acid
  Variant (346)..(346): Xaa in position 346 is any amino acid
  Variant (348)..(349): Xaa in position 348 to 349 is any amino acid
  Variant (351)..(355): Xaa in position 351 to 355 is any amino acid
  Variant (356)..(358): Xaa in position 356 to 358 is any or no amino acid
  Variant (360)..(363): Xaa in position 360 to 363 is any amino acid
  Variant (364)..(365): Xaa in position 364 to 365 is any or no amino acid
  Variant (367)..(370): Xaa in position 367 to 370 is any amino acid
  Variant (372)..(373): Xaa in position 372 to 373 is any amino acid
  Variant (377)..(378): Xaa in position 377 to 378 is any amino acid
  Variant (380)..(380): Xaa in position 380 is any amino acid
  Variant (382)..(388): Xaa in position 382 to 388 is any amino acid
  Variant (389)..(389): Xaa in position 389 is any or no amino acid
  Variant (391)..(391): Xaa in position 391 is any amino acid
  Variant (393)..(393): Xaa in position 393 is any amino acid
  Variant (395)..(395): Xaa in position 395 is any amino acid
  Variant (398)..(398): Xaa in position 398 is any amino acid
  Variant (400)..(400): Xaa in position 400 is any amino acid
  Variant (403)..(437): Xaa in position 403 to 437 is any amino acid
  Variant (438)..(478): Xaa in position 438 to 478 is any or no amino acid
EXXRQXXXXELIASENXXSXXVXXAXGSXXTNKYXEGYPGXRYYGGXXXXDXXEXLXXXRAXXXFXXXXXXXXXNVQPXSGXXXXANXXVXXXXXXPXXDXXXGXXLXXGGHLXHGXXXXXXXXXXXXXXXXXXXXYXXXXXXXXIDYXXXXXXAXXXXPKXIXXGXSAYXXXXDXXXXRXIADXXGAXLXXDMAHXXGLXAAXXXXXPXXXXXXXVTXTTHKXLRGPRGGXIXXXXXXXXXXXXXXXXXXXXXXXXXXXXXXXXXXFPGXQGGPXXHXIAXXAVXXXXAXXXXFKXYXXQVXXNAXXXXXXXXXXXXXXXXXXXXXXXXXXXXXXVXGGTXXHLXLXXLXXXXXXXXGXXXXXXLXXXXIXXNKNXXPXDXXXXXXXXGXRXGXPAXTXRGXXXXXXXXXXXXXXXXXXXXXXXXXXXXXXXXXXXXXXXXXXXXXXXXXXXXXXXXXXXXXXXXXXXXXXXXXXXXP

SEQ ID NO: 10730 - protein, 27 aa, Artificial sequence
  protein pattern
  Variant (3)..(5): Xaa in position 3 to 5 is any amino acid
  Variant (6)..(6): Xaa in position 6 is Phe, Ile, Leu or Val
  Variant (7)..(7): Xaa in position 7 is any amino acid
  Variant (8)..(8): Xaa in position 8 is Leu or Met
  Variant (10)..(10): Xaa in position 10 is Ala or Pro
  Variant (14)..(14): Xaa in position 14 is any amino acid
  Variant (15)..(15): Xaa in position 15 is Ala, Cys, Pro, Thr or Val
  Variant (17)..(18): Xaa in position 17 to 18 is any amino acid
  Variant (20)..(21): Xaa in position 20 to 21 is any amino acid
  Variant (23)..(23): Xaa in position 23 is any amino acid
  Variant (25)..(26): Xaa in position 25 to 26 is any amino acid
  Variant (27)..(27): Xaa in position 27 is Phe, Leu or Met
RQXXXXXXIXSENXXSXXVXXAXGXXX

SEQ ID NO: 10731 - protein, 31 aa, Artificial sequence
  protein pattern
  Variant (2)..(2): Xaa in position 2 is any amino acid
  Variant (3)..(3): Xaa in position 3 is Ile or Val
  Variant (4)..(4): Xaa in position 4 is Ala or Cys
  Variant (5)..(5): Xaa in position 5 is Asp, Asn or Thr
  Variant (6)..(8): Xaa in position 6 to 8 is any amino acid
  Variant (9)..(9): Xaa in position 9 is Ala or Ser
  Variant (10)..(10): Xaa in position 10 is any amino acid
  Variant (11)..(11): Xaa in position 11 is Phe, Ile, Leu, Met or Val
  Variant (12)..(13): Xaa in position 12 to 13 is any amino acid
  Variant (15)..(15): Xaa in position 15 is Ile, Met or Val
  Variant (18)..(18): Xaa in position 18 is any amino acid
  Variant (19)..(19): Xaa in position 19 is Ala or Ser
  Variant (22)..(22): Xaa in position 22 is any amino acid
  Variant (23)..(23): Xaa in position 23 is any or no amino acid
  Variant (25)..(28): Xaa in position 25 to 28 is any amino acid
  Variant (29)..(30): Xaa in position 29 to 30 is any or no amino acid
RXXXXXXXXXXXXDXAHXXGLXXAXXXXXXP

SEQ ID NO: 10732 - protein, 20 aa, Artificial sequence
  protein pattern
  Variant (4)..(4): Xaa in position 4 is Ala or Ser
  Variant (7)..(7): Xaa in position 7 is any amino acid
  Variant (10)..(10): Xaa in position 10 is any amino acid
  Variant (16)..(16): Xaa in position 16 is Ala, Cys, Asn or Thr
  Variant (17)..(18): Xaa in position 17 to 18 is any amino acid
  Variant (19)..(19): Xaa in position 19 is Ala, Ile or Val
NKYXEGXPGXRYYGGXXXXD

SEQ ID NO: 10733 - protein, 17 aa, Artificial sequence
  protein pattern
  Variant (2)..(2): Xaa in position 2 is Ser or Thr
  Variant (7)..(7): Xaa in position 7 is Asn, Ser or Thr
  Variant (13)..(13): Xaa in position 13 is any or no amino acid
  Variant (15)..(15): Xaa in position 15 is any amino acid
  Variant (16)..(16): Xaa in position 16 is any or no amino acid
TXTTHKXLRGPRXGXXI

SEQ ID NO: 10734 - protein, 20 aa, Artificial sequence
  protein pattern
  Variant (2)..(2): Xaa in position 2 is any or no amino acid
  Variant (4)..(4): Xaa in position 4 is any or no amino acid
  Variant (9)..(10): Xaa in position 9 to 10 is any amino acid
  Variant (12)..(12): Xaa in position 12 is any amino acid
  Variant (13)..(13): Xaa in position 13 is Ile, Met or Val
  Variant (14)..(14): Xaa in position 14 is Ala, Gly, Ser or Thr
  Variant (15)..(15): Xaa in position 15 is Ala, Gly or Ser
  Variant (16)..(16): Xaa in position 16 is any amino acid
  Variant (17)..(17): Xaa in position 17 is Ala, Gly or Ser
  Variant (18)..(18): Xaa in position 18 is any amino acid
  Variant (19)..(19): Xaa in position 19 is Ala, Cys, Gly, Ser or Thr
  Variant (20)..(20): Xaa in position 20 is Phe, Leu or Met
PXGXQGGPXXHXXXXXXXXX

SEQ ID NO: 10735 - protein, 14 aa, Artificial sequence
  protein pattern
  Variant (2)..(2): Xaa in position 2 is any or no amino acid
  Variant (5)..(5): Xaa in position 5 is any amino acid
  Variant (8)..(8): Xaa in position 8 is Ala or Ser
  Variant (9)..(9): Xaa in position 9 is Asn, Pro, Gln, Ser or Thr
  Variant (10)..(10): Xaa in position 10 is any amino acid
  Variant (12)..(13): Xaa in position 12 to 13 is any amino acid
  Variant (14)..(14): Xaa in position 14 is Ala, Ile or Val
NXQPXSGXXXNXXX

SEQ ID NO: 10736 - protein, 13 aa, Artificial sequence
  protein pattern
  Variant (2)..(2): Xaa in position 2 is Ile, Leu or Val
  Variant (4)..(4): Xaa in position 4 is Ile, Leu, Met or Val
  Variant (6)..(6): Xaa in position 6 is Ala, Ser or Thr
  Variant (9)..(9): Xaa in position 9 is any amino acid
  Variant (11)..(11): Xaa in position 11 is any amino acid
GXRXGXPAXTXRG

SEQ ID NO: 10737 - DNA, 822 bp, Arabidopsis thaliana
  CDS (1)..(822)
atgtcaatggcgtctatagcttcttcttcttccaccaccctactctcttcctctagggttcttcttccctccaagtcttctcttttatctcctaccgtctctttccccagaatcataccctcttcctcggcatcatcctcttctctctgttccgggttctccagtctcggttccctcaccaccaaccgctccgcctcacgccggaacttcgccgtcaaggctcaggctgatgatttaccactggtcggtaataaggcgcctgattttgaagctgaggcagtttttgatcaagagttcataaaggtgaagctctctgagtacattggcaaaaagtatgttattctattcttctaccctttggacttcacttttgtctgccccactgagattactgccttcagtgaccgttatgaagaatttgagaagctaaacaccgaagtattaggggtctctgtcgacagtgtgttctcgcatcttgcgtgggtccaaacagacagaaagtcgggagggctcggtgatctgaattatcctcttgtttcggatatcactaaatccatttcaaaatcgtttggagtgctcatccctgatcagggcattgcactgagagggcttttcatcatagacaaggaaggagtcattcagcattccaccatcaacaacctcggtattggccgaagtgttgatgagacaatgagaaccctccaggcattacagtatgttcaagaaaacccggatgaagtgtgccctgcgggatggaagccaggggagaaatcaatgaaacctgaccccaagctcagcaaagaatacttttcagctatctag

SEQ ID NO: 10738 - protein, 273 aa, Arabidopsis thaliana
MSMASIASSSSTTLLSSSRVLLPSKSSLLSPTVSFPRIIPSSSASSSSLCSGFSSLGSLTTNRSASRRNFAVKAQADDLPLVGNKAPDFEAEAVFDQEFIKVKLSEYIGKKYVILFFYPLDFTFVCPTEITAFSDRYEEFEKLNTEVLGVSVDSVFSHLAWVQTDRKSGGLGDLNYPLVSDITKSISKSFGVLIPDQGIALRGLFIIDKEGVIQHSTINNLGIGRSVDETMRTLQALQYVQENPDEVCPAGWKPGEKSMKPDPKLSKEYFSAI

SEQ ID NO: 10739 - DNA, 885 bp, Glycine max
  CDS (82)..(882)
acctcatacttccactaccaagagaaagtcgttgacacaccacagataagcttctcgtcgctcacagcgaagagtcacacaatggcgtctgtcacttctccaaccactctcatctcctcctccacgagggctttcccagccaagtcttattcgcttccttctccctcagtctctttccttcgaaccctatcctctccttcctcatccgcttctctccgctccgcgtttgctcaacgctcttccctcagctccagttctcgccgtagcttcgctgtcaaggctcagaccgatgatcttccattggttggaaacaaggcccctgattttgaggcagaggcagtgtttgatcaggagttcatcaaggttaagctctctgagtacattgggaagaagtatgtgattctctttttctacccattggacttcactttcgtctgcccaacagagattactgccttcagtgaccggtacgcagagtttgagaagctgaacacggaagtgttaggtgtctcagtcgatagtgtgttctcccaccttgcgtgggtccagacagacagaaaatctggagggctcggtgatctgaactatcccctgatctcagatgtaactaaatcaatctcaaagtcatttggagtgctcatccatgatcagggaatagcactgagggggcttttcatcatcgacaaggaaggagtgatccaacattccaccatcaacaatcttggtattggacgaagtgttgatgagacaatgagaaccctccaggcgttacagtacatccaggagaaccctgatgaagtctgccctgcagggtggaaacctggtgagaagtcaatgaaacctgaccccaagctcagcaaagagtacttctcagctatttagaat

SEQ ID NO: 10740 - protein, 266 aa, Glycine max
MASVTSPTTLISSSTRAFPAKSYSLPSPSVSFLRTLSSPSSSASLRSAFAQRSSLSSSSRRSFAVKAQTDDLPLVGNKAPDFEAEAVFDQEFIKVKLSEYIGKKYVILFFYPLDFTFVCPTEITAFSDRYAEFEKLNTEVLGVSVDSVFSHLAWVQTDRKSGGLGDLNYPLISDVTKSISKSFGVLIHDQGIALRGLFIIDKEGVIQHSTINNLGIGRSVDETMRTLQALQYIQENPDEVCPAGWKPGEKSMKPDPKLSKEYFSAI

SEQ ID NO: 10741 - DNA, 798 bp, Arabidopsis thaliana
  CDS (1)..(798)
atggcgtctgttgcttcttcaactactctcatctcttctccctcttctagggtttttccagcaaagtcttcactttcctctccatctgtttctttccttcgaaccctttcttctccttccgcatctgcttctctccgctccggatttgctcgacgctcttccctcagctccacttctcgtcggagctttgctgtcaaagcccaggccgatgatcttccactggttggaaacaaggcgcctgattttaaggcagaggctgtgtttgatcaagagttcatcaaggttaagctctctgattacaatgggaagaagtatgtgattctctttttctacccattggactttactttcgtctgcccaacagagattactgccttcagtgaccggcattcagaatttgagaagttgaacaccgaagtattaggtgtttctgtcgatagtgtgttctctcaccttgcatgggtccaaacagacaggaaatctggagggcttggtgatctgaactatccccttatttcagatgtcactaaatcaatctcaaagtcgttcggagtgctcatccatgatcagggaatagcactgagaggacttttcataatcgacaaggaaggagtgatccaacattccaccatcaacaatcttggtattggccgaagcgttgatgagacaatgagaaccctccaggcattacagtacacaggaaacccggatgaagtctgcccagcaggatggaagtcgggtgagaagtcaatgaaacccgacccaaaactcagcaaagagtacttctcagctatttag

SEQ ID NO: 10742 - protein, 265 aa, Arabidopsis thaliana
MASVASSTTLISSPSSRVFPAKSSLSSPSVSFLRTLSSPSASASLRSGFARRSSLSSTSRRSFAVKAQADDLPLVGNKAPDFKAEAVFDQEFIKVKLSDYNGKKYVILFFYPLDFTFVCPTEITAFSDRHSEFEKLNTEVLGVSVDSVFSHLAWVQTDRKSGGLGDLNYPLISDVTKSISKSFGVLIHDQGIALRGLFIIDKEGVIQHSTINNLGIGRSVDETMRTLQALQYTGNPDEVCPAGWKSGEKSMKPDPKLSKEYFSAI

SEQ ID NO: 10743 - DNA, 1084 bp, Zea mays
  CDS (77)..(859)
gaaacccatcgcaaattcgcaaactaaccccaaaccccaatccaccccatcccctcctcatccactccgggcggccatggcctgctccttctccgccgccatcaccgtctcttccgcccctaccccggccgccagacccctcgctgctgccacgcagtccgtctgcatcgctcgctccgcggtcgccaccactgccaggccgctccgcctcgccgcctcaaggtccgcgcgggctaccagactcgttgcccgcgccagcgtagtcgatgacttgccgctggtcgggaacaaggcgccagacttcgaagccgaggctgtgttcgaccaggagttcatcaacgtgaagctctctgattacattgggaagaagtacgtcattctgttcttctaccccttggatttcaccttcgtctgcccgaccgagattactgcgtttagtgacagatacgaggaatttgagaagttgaacactgaggttcttggtgtttccattgacagtgtgttctcccaccttgcatgggtgcagacagacaggaagtcgggtgggctcggcgatcttaaatacccacttgtttctgatgtgaccaaatcaatttcaaaggcctttggtgttctgatccctgaccagggtattgctttgagaggactgttcatcattgacaaggagggagtgattcagcactctaccattaacaaccttgccattggtcgtagtgtggatgagaccatgaggacccttcaggcattgcagtacgtccaggagaacccagacgaggtgtgcccggccggatggaaaccaggggagaggtcgatgaagcccgaccccaagggaagcaaagagtacttcgcggccatctagattcgtcgtcattgagaagcaggtgcccgttaagtgctccagcagtaggttctcgtgttcagcggagctcgcgttttgacaagtgtgttgtgctgatgtgcatcccgatttgagtgctgttctttgccaccttgtttagttctttcagctgacgaataaggttcattgcacgtgattgagcgcccacgtttttggttttagcgtagtttgttgggattgactggt

SEQ ID NO: 10744 - protein, 260 aa, Zea mays
MACSFSAAITVSSAPTPAARPLAAATQSVCIARSAVATTARPLRLAASRSARATRLVARASVVDDLPLVGNKAPDFEAEAVFDQEFINVKLSDYIGKKYVILFFYPLDFTFVCPTEITAFSDRYEEFEKLNTEVLGVSIDSVFSHLAWVQTDRKSGGLGDLKYPLVSDVTKSISKAFGVLIPDQGIALRGLFIIDKEGVIQHSTINNLAIGRSVDETMRTLQALQYVQENPDEVCPAGWKPGERSMKPDPKGSKEYFAAI

SEQ ID NO: 10745 - DNA, 786 bp, Oryza sativa
  CDS (1)..(786)
atggccgcctgctgctcctccctcgccaccgccgtctcctcctcctccgccaagcccctcgccggcatcccccccgccgcgccgcactccctctccctcccccgcgctcccgccgccaggcccctccgcctctccgcctcctcatccagatccgcccgggccagcagcttcgtcgcccgcgccggcggtgtggacgatgcgccgctggtcgggaacaaggcgcccgacttcgatgcggaggcagtcttcgaccaggagttcatcaacgtgaagctgtccgactacatcgggaagaagtacgtcattctcttcttctacccgttggacttcaccttcgtctgcccgaccgagattaccgctttcagtgacagatacgatgagttcgagaagttgaacactgagatcctcggtgtttcaattgacagtgtgttctcccatcttgcatgggtgcagacagacaggaaatctggtgggcttggtgatctgaaatacccattgatttcagatgttactaaatcaatttcgaagtcctttggtgtcttgatccctgaccagggaattgctctgagaggacttttcatcattgacaaggagggagtgattcagcactctaccattaacaaccttgccattggacgcagtgtagatgagaccatgaggacccttcaggcgttgcagtacgtccaggacaacccggacgaggtgtgcccggccggatggaagcccggtgacaagtcgatgaagcctgaccccaagggaagcaaggagtacttcgcggccatctaa

SEQ ID NO: 10746 - protein, 261 aa, Oryza sativa
MAACCSSLATAVSSSSAKPLAGIPPAAPHSLSLPRAPAARPLRLSASSSRSARASSFVARAGGVDDAPLVGNKAPDFDAEAVFDQEFINVKLSDYIGKKYVILFFYPLDFTFVCPTEITAFSDRYDEFEKLNTEILGVSIDSVFSHLAWVQTDRKSGGLGDLKYPLISDVTKSISKSFGVLIPDQGIALRGLFIIDKEGVIQHSTINNLAIGRSVDETMRTLQALQYVQDNPDEVCPAGWKPGDKSMKPDPKGSKEYFAAI

SEQ ID NO: 10747 - DNA, 783 bp, Glycine max
  CDS (1)..(783)
atggcatgctcagccacctctgcttccctcttctccgcaaacccaacacccctcttctctcccaaaccctctctctccctccaccttaaccctctccccacgcgcccttctccctccctcacgcgcccttctctctccctcacgcgcccttctcactctcgccgctccttcgttgtcaaagcctcctccagcgagcttccgctggttggtaacaccgcaccggatttcgaagcagaggctgtgtttgaccaggagtttatcaacgtgaaactatctgattacattgggaagaaatatgttgtgctcttcttctacccgttggacttcacctttgtctgccccacagaaatcactgctttcagtgaccgacatgcagagttcgaggcactaaatactgagatattgggtgtttcagttgacagtgtgttctcgcaccttgcatggatccaaacagatagaaagtcaggtggccttggtgacttgaactatcctttgatttctgatgtcaccaaatccatatcgaaatcttatggtgttctcattcctgatcagggaattgcattgagaggattgttcattattgacaaggaaggggttattcagcattctaccattaacaacttggcaattggtagaagtgttgacgagacaaagagaactctccaggccttacagtatgtgcaggagaacccagatgaagtttgccctgctgggtggaagcctggggagaagtccatgaaaccagaccctaaacttagcaaagactactttgcagcggtgtag

SEQ ID NO: 10748 - protein, 260 aa, Glycine max
MACSATSASLFSANPTPLFSPKPSLSLHLNPLPTRPSPSLTRPSLSLTRPSHSRRSFVVKASSSELPLVGNTAPDFEAEAVFDQEFINVKLSDYIGKKYVVLFFYPLDFTFVCPTEITAFSDRHAEFEALNTEILGVSVDSVFSHLAWIQTDRKSGGLGDLNYPLISDVTKSISKSYGVLIPDQGIALRGLFIIDKEGVIQHSTINNLAIGRSVDETKRTLQALQYVQENPDEVCPAGWKPGEKSMKPDPKLSKDYFAAV

SEQ ID NO: 10749 - DNA, 687 bp, Glycine max
  CDS (1)..(687)
atggcatgctcagccacctctgcttctctcttctccgcaaaccccacacctctcttctctcccaaatcctccctctccctccctaacaactctctccacctcaaccctctccccacgcgcccttctctctccctcacgcgcccctcgcacactcgccgctccttcgtcgtcaaagcctcctccagcgagcttccgctagttggaaacaccgcaccggatttcgaagcagaggctgtgtttgaccaggagtttatcaacgtgaaactatctgattacattgggaagaaatatgttgtgctcttcttctacccgttggacttcacttttgtttgtcccacagaaatcactgctttcagtgaccggcatgcagagttcgaggcactaaatactgagatattgggtgtttcagttgacagtgtgttctcgcaccttgcatggatccaaacagatagaaagtcaggtggccttggtgacttgaattatcctttgatttctgatgtcaccaaatccatatcgaaatcttatggtgttctcattcctgatcagggaattgcattgagaggtttgttcattattgacaaggaaggggttattcagcattctaccattaacaacttggcaattggtagaagtgttgacgagacaaagagaactctccaggtaattacacactcaattagcagttag

SEQ ID NO: 10750 - protein, 228 aa, Glycine max
MACSATSASLFSANPTPLFSPKSSLSLPNNSLHLNPLPTRPSLSLTRPSHTRRSFVVKASSSELPLVGNTAPDFEAEAVFDQEFINVKLSDYIGKKYVVLFFYPLDFTFVCPTEITAFSDRHAEFEALNTEILGVSVDSVFSHLAWIQTDRKSGGLGDLNYPLISDVTKSISKSYGVLIPDQGIALRGLFIIDKEGVIQHSTINNLAIGRSVDETKRTLQVITHSISS

SEQ ID NO: 10751 - DNA, 777 bp, Glycine max
  CDS (1)..(777)
atggcatgctcagccacctctgcttctctcttctccgcaaaccccacacctctcttctctcccaaatcctccctctccctccctaacaactctctccacctcaaccctctccccacgcgcccttctctctccctcacgcgcccctcgcacactcgccgctccttcgtcgtcaaagcctcctccagcgagcttccgctagttggaaacaccgcaccggatttcgaagcagaggctgtgtttgaccaggagtttatcaacgtgaaactatctgattacattgggaagaaatatgttgtgctcttcttctacccgttggacttcacttttgtttgtcccacagaaatcactgctttcagtgaccggcatgcagagttcgaggcactaaatactgagatattgggtgtttcagttgacagtgtgttctcgcaccttgcatggatccaaacagatagaaagtcaggtggccttggtgacttgaattatcctttgatttctgatgtcaccaaatccatatcgaaatcttatggtgttctcattcctgatcagggaattgcattgagaggtttgttcattattgacaaggaaggggttattcagcattctaccattaacaacttggcaattggtagaagtgttgacgagacaaagagaactctccaggccttacagtatgtgcaggagaacccagatgaagtttgccctgctgggtggaagcctggggagaagtccatgaaaccagaccctaaacttagcaaagactactttgcagcggtgtag

SEQ ID NO: 10752 - protein, 258 aa, Glycine max
MACSATSASLFSANPTPLFSPKSSLSLPNNSLHLNPLPTRPSLSLTRPSHTRRSFVVKASSSELPLVGNTAPDFEAEAVFDQEFINVKLSDYIGKKYVVLFFYPLDFTFVCPTEITAFSDRHAEFEALNTEILGVSVDSVFSHLAWIQTDRKSGGLGDLNYPLISDVTKSISKSYGVLIPDQGIALRGLFIIDKEGVIQHSTINNLAIGRSVDETKRTLQALQYVQENPDEVCPAGWKPGEKSMKPDPKLSKDYFAAV

SEQ ID NO: 10753 - DNA, 1013 bp, Zea mays
  CDS (53)..(859)
agacagataagtgtttcccagagagaagagagagagagagagacaagtctcaatggcgtctgtagcttcttcaaccactctcatctcctcctccgctagtgttctcccagccaccaagtcttcgcttcttccatctccctccctctctttccttccaaccctctcctctccttccccatccgcttctctccggctcgctcgtccctctcccctcacctcaatccgctcctcttctcgccggagcttcgctgtcaaggcccaaaccgatgatcttccattggttggaaacaaggcgcctgattttgaggcagaggctgtgttcgatcaggagttcatcaaggtcaagctctctgagtacattgggaagaagtatgtgattctctttttctaccccttggacttcactttcgtctgcccaacagagattactgccttcagtgaccggtatgcagaatttgagaagctgaacacagaagtgttaggtgtctctgttgatagtgtgttctcccaccttgcttgggttcaaaccgacagaaaatctggaggacttggtgatctcaactatccacttatatcagatgtcactaaatctatctcaaaatcttttggagtgctcatccatgatcagggaatagcgttgagagggcttttcataatagacaaggaaggagtgatccaacattcaaccatcaacaatcttggtattggccgaagtgttgatgagacaatgagaacccttcaggcattacagtacatccaggagaaccctgatgaagtctgccctgcaggatggaaaccaggggagaagtcaatgaaacctgaccccaagctcagcaaagagtatttctcagctatttagaaatatctacaaaacctttgttatatgtgagctgagtttttattttaaacgctgaacattcctttgtttgaatctccactttgtccccccagaatccttgaaacttcattttccattaataaaagtcttgttatctccaaaaaaaaaaaaaaaa

SEQ ID NO: 10754 - protein, 268 aa, Zea mays
MASVASSTTLISSSASVLPATKSSLLPSPSLSFLPTLSSPSPSASLRLARPSPLTSIRSSSRRSFAVKAQTDDLPLVGNKAPDFEAEAVFDQEFIKVKLSEYIGKKYVILFFYPLDFTFVCPTEITAFSDRYAEFEKLNTEVLGVSVDSVFSHLAWVQTDRKSGGLGDLNYPLISDVTKSISKSFGVLIHDQGIALRGLFIIDKEGVIQHSTINNLGIGRSVDETMRTLQALQYIQENPDEVCPAGWKPGEKSMKPDPKLSKEYFSAI

SEQ ID NO: 10755 - DNA, 848 bp, Brassica rapa
  CDS (26)..(832)
ttgtacaaaaaagcaggcttaaacaatggcgtctgttgcttcttcaaccactctcatctcctcctccgctagtgttctcccagccaccaagtcttcgcttcttccatctccctccctctctttccttccaaccctctcctctccttccccatccgcttctctccggctccctcgtccctctcccctcacctcaatccgctcctcttctcgccggagcttcgctgtcaaggcccaaaccgatgatcttccattggttggaaacaaggcgcctgattttgaggcagaggctgtgttcgatcaggagttcatcaaggtcaagctctctgagtacattgggaagaagtatgtgattctctttttctaccccttggacttcactttcgtctgcccaacagagattactgccttcagtgaccgatatgcagaatttgagaagctgaacacagaagtgttaggtgtctctgttgatagtgtgttctcccaccttgcttgggttcaaaccgacagaaaatctggaggacttggtgatctcaactatccacttatatcagatgtcactaaatctatctcaaaatcttttggagtgctcatccatgatcagggaatagcgttgagagggcttttcataatagacaaggaaggagtgatccaacattcaaccatcaacaatcttggtattggccgaagtgttgatgagacaatgagaacccttcaggcattacagtacatccaggagaaccctgatgaagtctgccctgcaggatggaaaccaggggagaagtcaatgaaacctgaccccaagctcagcaaagagtacttctcagctatttagctcgaacccagctttc

SEQ ID NO: 10756 - protein, 268 aa, Brassica rapa
MASVASSTTLISSSASVLPATKSSLLPSPSLSFLPTLSSPSPSASLRLPRPSPLTSIRSSSRRSFAVKAQTDDLPLVGNKAPDFEAEAVFDQEFIKVKLSEYIGKKYVILFFYPLDFTFVCPTEITAFSDRYAEFEKLNTEVLGVSVDSVFSHLAWVQTDRKSGGLGDLNYPLISDVTKSISKSFGVLIHDQGIALRGLFIIDKEGVIQHSTINNLGIGRSVDETMRTLQALQYIQENPDEVCPAGWKPGEKSMKPDPKLSKEYFSAI

SEQ ID NO: 10757 - DNA, 816 bp, Arabidopsis thaliana
  CDS (1)..(816)
atggcgtctatagcttcttcttcttccaccaccctactctcttcctctagggttcttcttccctccaagtcttctcttttatctcctaccgtctctttccccagaatcataccctcttcctcggcatcatcctcttctctctgttccgggttctccagtctcggttccctcaccaccaaccgctccgcctcacgccggaacttcgccgtcaaggctcaggctgatgatttaccactggtcggtaataaggcgcctgattttgaagctgaggcagtttttgatcaagagttcataaaggtgaagctctctgagtacattggcaaaaagtatgttattctattcttctaccctttggacttcacttttgtctgccccactgagattactgccttcagtgaccgttatgaagaatttgagaagctaaacaccgaagtattaggggtctctgtcgacagtgtgttctcgcatcttgcgtgggtccaaacagacagaaagtcgggagggctcggtgatctgaattatcctcttgtttcggatatcactaaatccatttcaaaatcgtttggagtgctcatccctgatcagggcattgcactgagagggcttttcatcatagacaaggaaggagtcattcagcattcccccatcaacaacctcggtattggccgaagtgttgatgagacaatgagaaccctccaggcattacagtatgttcaagaaaacccggatgaagtgtgccctgcgggatggaagccaggggagaaatcaatgaaacctgaccccaagctcagcaaagaatacttttcagctatctag

SEQ ID NO: 10758 - protein, 271 aa, Arabidopsis thaliana
MASIASSSSTTLLSSSRVLLPSKSSLLSPTVSFPRIIPSSSASSSSLCSGFSSLGSLTTNRSASRRNFAVKAQADDLPLVGNKAPDFEAEAVFDQEFIKVKLSEYIGKKYVILFFYPLDFTFVCPTEITAFSDRYEEFEKLNTEVLGVSVDSVFSHLAWVQTDRKSGGLGDLNYPLVSDITKSISKSFGVLIPDQGIALRGLFIIDKEGVIQHSPINNLGIGRSVDETMRTLQALQYVQENPDEVCPAGWKPGEKSMKPDPKLSKEYFSAI

SEQ ID NO: 10759 - DNA, 801 bp, Arabidopsis thaliana
  CDS (1)..(801)
atggcgtctgttgcttcttcaactactctcatctcttctccctcttctagggtttttccagcaaagtcttcactttcctctccatctgtttctttccttcgaaccctttcttctccttccgcatctgcttctctccgctccggatttgctcgacgctcttccctcagctccacttctcgtcggagctttgctgtcaaagcccaggccgatgatcttccactggttggaaacaaggcgcctgattttgaggcagaggctgtgtttgatcaagagttcatcaaggttaagctctctgattacattggaaagaagtatgtgattctctttttctacccattggactttactttcgtctgcccaacagagattactgccttcagtgaccggcattcagaatttgagaagttgaacaccgaagtattaggtgtttctgtcgatagtgtgttctctcaccttgcatgggtccaaacagacaggaaatctggagggcttggtgatctgaactatccccttatttcatatttcactaaatcaatctcaaagtcgttcggagtgctcatccatgatcagggaatagcactgagaggacttttcataatcgacaaggaaggagtgatccaacattccaccatcaacaatcttggtattggccaaagcgttgatgagacaatgagaaccctccaggcattacagtacatccaggaaaacccggatgaagtctgcccagcaggatggaagccgggtgagaagtcaatgaaacccgacccaaaactcagcaaagagtacttctcagctatttag

SEQ ID NO: 10760 - protein, 266 aa, Arabidopsis thaliana
MASVASSTTLISSPSSRVFPAKSSLSSPSVSFLRTLSSPSASASLRSGFARRSSLSSTSRRSFAVKAQADDLPLVGNKAPDFEAEAVFDQEFIKVKLSDYIGKKYVILFFYPLDFTFVCPTEITAFSDRHSEFEKLNTEVLGVSVDSVFSHLAWVQTDRKSGGLGDLNYPLISYFTKSISKSFGVLIHDQGIALRGLFIIDKEGVIQHSTINNLGIGQSVDETMRTLQALQYIQENPDEVCPAGWKPGEKSMKPDPKLSKEYFSAI

SEQ ID NO: 10761 - DNA, 783 bp, Zea mays
  CDS (1)..(783)
atggcctgctccttcgccgccgcgaccgtcgtctcttccgcccccaccccggccgccaggcccctcgccgttgccccgcagtccgtctctgtctcccgctccgcggtcgccaccgccgccaggccgctccgcctcgtcgcctccagatccgcgcgggccaccagactcgtcgcccgcgccggcggcgtcgatgacttgccgctggtcgggaacaaggcgccagacttcgaagccgaggccgtgttcgaccaagagttcatcaacgtgaagctctctgattacatcgggaagaaatacgtcgttctgttcttctaccccttggatttcacctttgtctgcccgaccgagattactgccttcagtgacagatatgaggaattcgagaagttgaacactgaggttcttggtgtctctattgacagtgtgttctcccaccttgcatgggtgcagacagacaggaagtctggtgggcttggcgatcttaaatacccacttatttctgatgtcaccaaatcaatttcaaaggccttcggtgttctgatccctgaccagggtatcgctctgagaggactgttcatcattgacaaggagggagtgattcagcactctaccattaacaaccttgccattggtcgcagtgtggacgagaccatgaggacccttcaggcattgcagtacgtccaggagaacccagacgaggtctgcccggccggttggaagccaggggagaggtccatgaagcccgaccccaagggaagcaaagagtacttcgcggccgtgtag

SEQ ID NO: 10762 - protein, 260 aa, Zea mays
MACSFAAATVVSSAPTPAARPLAVAPQSVSVSRSAVATAARPLRLVASRSARATRLVARAGGVDDLPLVGNKAPDFEAEAVFDQEFINVKLSDYIGKKYVVLFFYPLDFTFVCPTEITAFSDRYEEFEKLNTEVLGVSIDSVFSHLAWVQTDRKSGGLGDLKYPLISDVTKSISKAFGVLIPDQGIALRGLFIIDKEGVIQHSTINNLAIGRSVDETMRTLQALQYVQENPDEVCPAGWKPGERSMKPDPKGSKEYFAAV

SEQ ID NO: 10763 - DNA, 783 bp, Zea mays
  CDS (1)..(783)
atggcctgctccttctccgccgccatcaccgtctcttccgcccctaccccggccgccagacccctcgctgctgccccgcagtccgtctgcatcgctcgctccgcggtcgccaccactgccaggccgctccgcctcgccgcctcaaggtccgcgcgggctaccagactcgttgcccgcgccagcgtagtcgatgacttgccgctggtcgggaacaaggcgccagacttagaagccgaggctgtgttcgaccaggagttcatcaacgtgaagctctctgattacattgggaagaagtacgtcattctgttcttctaccccttggatttcaccttcgtctgcccgaccgagattactgcgtttagtgacagatacgaggaatttgagaagttgaacactgaggttcttggtgtttccattgacagtgtgttctcccaccttgcatgggtgcagacagacaggaagtcgggtgggctcggcgatcttaaatacccacttgtttctgatgtgaccaaatcaatttcaaaggcctttggtgttctgatccctgaccagggtattgctttgagaggactgttcatcattgacaaggagggagtgattcagcactctaccattaacaaccttgccattggtcgtagtgtggatgagaccatgaggacccttcaggcattgcagtacgtccaggagaacccagacgaggtgtgcccggccggatggaaaccaggggagaggtcgatgaagcccgaccccaagggaagcaaagagtacttcgcggccatctag

SEQ ID NO: 10764 - protein, 260 aa, Zea mays
MACSFSAAITVSSAPTPAARPLAAAPQSVCIARSAVATTARPLRLAASRSARATRLVARASVVDDLPLVGNKAPDLEAEAVFDQEFINVKLSDYIGKKYVILFFYPLDFTFVCPTEITAFSDRYEEFEKLNTEVLGVSIDSVFSHLAWVQTDRKSGGLGDLKYPLVSDVTKSISKAFGVLIPDQGIALRGLFIIDKEGVIQHSTINNLAIGRSVDETMRTLQALQYVQENPDEVCPAGWKPGERSMKPDPKGSKEYFAAI

SEQ ID NO: 10765 - DNA, 591 bp, Saccharomyces cerevisiae
  CDS (1)..(591)
atggtagcagaagttcaaaaacaagccccaccatttaagaaaaccgccgtagtcgacggtatcttcgaggaaatttcactggaaaagtataaaggtaagtacgttgttctagcttttgtcccattggctttttcatttgtctgtccaactgagattgttgcgttttccgatgccgccaagaaattcgaagatcagggcgcccaagttttatttgcctccaccgactctgaatattccttactggcatggaccaaccttcccagaaaagacggtggattaggtccagttaaagttcctttgcttgctgataagaatcattccttatccagagactatggcgttttgattgaaaaagaaggtatagctttaagaggtttgttcataatcgacccgaagggaatcattagacatatcactatcaatgatttatctgttggcagaaacgtcaatgaagctttgagattagtcgaaggtttccagtggactgacaaaaatggtacagttttgccatgcaactggaccccaggagccgccaccatcaaacctgacgttaaagattccaaggagtatttcaaaaatgccaataattaa

SEQ ID NO: 10766 - protein, 196 aa, Saccharomyces cerevisiae
MVAEVQKQAPPFKKTAVVDGIFEEISLEKYKGKYVVLAFVPLAFSFVCPTEIVAFSDAAKKFEDQGAQVLFASTDSEYSLLAWTNLPRKDGGLGPVKVPLLADKNHSLSRDYGVLIEKEGIALRGLFIIDPKGIIRHITINDLSVGRNVNEALRLVEGFQWTDKNGTVLPCNWTPGAATIKPDVKDSKEYFKNANN

SEQ ID NO: 10767 - DNA, 591 bp, Saccharomyces cerevisiae
  CDS (1)..(591)
atggtcgctcaagttcaaaagcaagctccaacttttaagaaaactgccgtcgtcgacggtgtctttgacgaagtctccttggacaaatacaagggtaagtacgttgtcctagcctttattccattggccttcactttcgtctgtccaaccgaaatcattgctttctcagaagctgctaagaaattcgaagaacaaggcgctcaagttcttttcgcctccactgactccgaatactcccttttggcatggaccaatatcccaagaaaggaaggtggtttgggcccaatcaacattccattgttggctgacaccaaccactctttgtccagagactatggtgtcttgatcgaagaagaaggtgtcgccttgagaggtttgttcatcatcgacccaaagggtgtcattagacacatcaccattaacgatttgccagtcggtagaaacgttgacgaagccttgagattggttgaagccttccaatggaccgacaagaacggtactgtcttgccatgtaactggactccaggtgctgctaccatcaagccaaccgttgaagactccaaggaatacttcgaagctgccaacaaataa

SEQ ID NO: 10768 - protein, 196 aa, Saccharomyces cerevisiae
MVAQVQKQAPTFKKTAVVDGVFDEVSLDKYKGKYVVLAFIPLAFTFVCPTEIIAFSEAAKKFEEQGAQVLFASTDSEYSLLAWTNIPRKEGGLGPINIPLLADTNHSLSRDYGVLIEEEGVALRGLFIIDPKGVIRHITINDLPVGRNVDEALRLVEAFQWTDKNGTVLPCNWTPGAATIKPTVEDSKEYFEAANK

SEQ ID NO: 10769 - DNA, 801 bp, Arabidopsis thaliana
  CDS (1)..(801)
atggcgtctgttgcttcttcaactactctcatctcttctccctcttctagggtttttccagcaaagtcttcactttcctctccatctgtttctttccttcgaaccctttcttctccttccgcatctgcttctctccgctccggatttgctcgacgctcttccctcagctccacttctcgtcggagctttgctgtcaaagcccaggccgatgatcttccactggttggaaacaaggcgcctgattttgaggcagaggctgtgtttgatcaagagttcatcaaggttaagctctctgattacattggaaagaagtatgtgattctctttttctacccattggactttactttcgtctgcccaacagagattactgccttcagtgaccggcattcagaatttgagaagttgaacaccgaagtattaggtgtttctgtcgatagtgtgttctctcaccttgcatgggtccaaacagacaggaaatctggagggcttggtgatctgaactatccccttatttcagatgtcactaaatcaatctcaaagtcgttcggagtgctcatccatgatcagggaatagcactgagaggacttttcataatcgacaaggaaggagtgatccaacattccaccatcaacaatcttggtattggccgaagcgttgatgagacaatgagaaccctccaggcattacagtacatccaggaaaacccggatgaagtctgcccagcaggatggaagccgggtgagaagtcaatgaaacccgacccaaaactcagcaaagagtacttctcagctatttag

SEQ ID NO: 10770 - protein, 266 aa, Arabidopsis thaliana
MASVASSTTLISSPSSRVFPAKSSLSSPSVSFLRTLSSPSASASLRSGFARRSSLSSTSRRSFAVKAQADDLPLVGNKAPDFEAEAVFDQEFIKVKLSDYIGKKYVILFFYPLDFTFVCPTEITAFSDRHSEFEKLNTEVLGVSVDSVFSHLAWVQTDRKSGGLGDLNYPLISDVTKSISKSFGVLIHDQGIALRGLFIIDKEGVIQHSTINNLGIGRSVDETMRTLQALQYIQENPDEVCPAGWKPGEKSMKPDPKLSKEYFSAI

SEQ ID NO: 10771 - DNA, 552 bp, Bacillus halodurans C-125
  CDS (1)..(552): transl_table=11
atgacggacaagcgtatggtagcaaagcaagcacctcgctttgaaatggatgctgtaatgccgaacaaggagttcggaaaagtaagcctcgaagagaatatgaagaacgacaaatggacagttcttttcttctatccaatggacttcacttttgtatgtccaacagaaattacatcactcagcgaccgttatgacgagtttgaagatttagatgcggaagtaattggggtttcaaccgacaccattcacacgcataaagcttggattaacacgtctcgtgatgacaacggcttaggagaccttaagtatccattagctgcagacacgaatcacgaagtctctcgtgaatatggtgtacttattgaggaagaaggaattgcacttcgtggactattcatcattagcccagaaggcgagcttatgtattctgtcgtcaaccataataacattggtcgtgacgtggatgaaacgcttcgtgttcttcaagcgctccaaactggtggcctttgccctgcaaactggaagccaggtcaagaaacattaagcgtttaa

SEQ ID NO: 10772 - protein, 183 aa, Bacillus halodurans C-125
MTDKRMVAKQAPRFEMDAVMPNKEFGKVSLEENMKNDKWTVLFFYPMDFTFVCPTEITSLSDRYDEFEDLDAEVIGVSTDTIHTHKAWINTSRDDNGLGDLKYPLAADTNHEVSREYGVLIEEEGIALRGLFIISPEGELMYSVVNHNNIGRDVDETLRVLQALQTGGLCPANWKPGQETLSV

SEQ ID NO: 10773 - DNA, 543 bp, Bacillus subtilis subsp. subtilis str. 168
  CDS (1)..(543): transl_table=11
atggcagaacgtatggtaggtaaacaagctcctcgttttgaaatggaagcagtccttgcaagcaaagaattcggcaaagtaagtcttgaggaaaacatgaaaaacgacaaatggacagtgctgttcttctatccaatggacttcacttttgtttgtccgacagaaattacagcaatgtctgaccgctatgacgagttcgaagatcttgatgcagaagtcatcggggtttcaactgataccatccatactcatttagcttggatcaatacagaccgcaaagaaaacggtcttggccagctgaaatacccgcttgctgctgatacaaaccatgaggtatcccgggaatatggcgttttaatcgaagaagaaggtgtggctttgcgcggattgtttattattaatcctgaaggggagcttcaatatcaaactgttttccataacaacattgggcgtgatgttgatgaaacgcttcgtgttctccaggcgctgcaaactggcggactctgtccggctaactggaaaccaggccaaaaaacactttaa

SEQ ID NO: 10774 - protein, 180 aa, Bacillus subtilis subsp. subtilis str. 168
MAERMVGKQAPRFEMEAVLASKEFGKVSLEENMKNDKWTVLFFYPMDFTFVCPTEITAMSDRYDEFEDLDAEVIGVSTDTIHTHLAWINTDRKENGLGQLKYPLAADTNHEVSREYGVLIEEEGVALRGLFIINPEGELQYQTVFHNNIGRDVDETLRVLQALQTGGLCPANWKPGQKTL

SEQ ID NO: 10775 - DNA, 701 bp, Synechocystis sp. PCC 6803
  CDS (36)..(638): transl_table=11
tatttcaatactcaccaagttttaagcaaacagcaatgacagaggtattaagggtaggacagccggcaccggatttcaccgccacggcgatcgtcgatcaaagcttccagaccgtcaaattaagcacctaccgtggtaagtacctggtgctgtttttctatcccctagatttcacctttgtctgtcccacggaaatcattgcctttagcgatcgccatagcgaatttactgccctagatacggaagttgtgggcatctccgtagacagcgaattttcacacctggcctggattcagaccgaacggaaaatggggggcatcggcaacattaactatcccctagtgtcagatctcaaaaaagaaattagccaagcctataatgtcctcgaacccgatgcaggcattgccctgcggggactattcattattgaccgggaaggcatcttacaatacgccaccgtcaacaatctctcctttggccggagtgtggacgaaactctgagggtactaaaagccattcgccatgtgcaatctcaccccaacgaagtttgcccagtggattggcaggaaggagacaaaaccatgatccccgacccggaaaaggctaagacctacttcgagacagtggcggaaccttaggtttgcccagccaaaaatgccgaccctaaatggataattttgactactaggctgactggtgag

SEQ ID NO: 10776 - protein, 200 aa, Synechocystis sp. PCC 6803
MTEVLRVGQPAPDFTATAIVDQSFQTVKLSTYRGKYLVLFFYPLDFTFVCPTEIIAFSDRHSEFTALDTEVVGISVDSEFSHLAWIQTERKMGGIGNINYPLVSDLKKEISQAYNVLEPDAGIALRGLFIIDREGILQYATVNNLSFGRSVDETLRVLKAIRHVQSHPNEVCPVDWQEGDKTMIPDPEKAKTYFETVAEP

SEQ ID NO: 10777 - DNA, 612 bp, Unknown
  nucleic acid homolog of SEQ ID NO: 10737
  CDS (1)..(612)
atgtccatcacctacggaacacaagaaagcctccgcgttggtcaacaggctcccgactttacagcaacagctgtagttgatcaggaattcaagacaattaagctttccgactatcgtggtaagtacgttgtcttgttcttctatcccctagactttacctttgtttgccccacggagatcacagcatttagcgatcgctacgaagaattcaagaaacttaacaccgaaattctcggtgtgtccgttgatagcgagttctcccacctagcttggattcaaactgatcgtaagtctggtggtgttggcgacctaaattatcccttagtttccgatattaagaaagaggttagcgacgcttacaacgtactagacccagcagcaggtatcgctttacgtggtctgttcatcatcgataaagatggtatcattcagcacgctaccattaacaacctagcttttggtcgtagcgttgatgaaaccctacggacattgcaagcaatccagtatgtccagtctcacccagatgaagtttgccctgctggttggcaacctggggaaaagaccatgactcccgaccctgtgaagtccaaagtttacttcgctgctgtgtaa

SEQ ID NO: 10778 - protein, 203 aa, Unknown
  polypeptide homolog of SEQ ID NO: 10738
MSITYGTQESLRVGQQAPDFTATAVVDQEFKTIKLSDYRGKYVVLFFYPLDFTFVCPTEITAFSDRYEEFKKLNTEILGVSVDSEFSHLAWIQTDRKSGGVGDLNYPLVSDIKKEVSDAYNVLDPAAGIALRGLFIIDKDGIIQHATINNLAFGRSVDETLRTLQAIQYVQSHPDEVCPAGWQPGEKTMTPDPVKSKVYFAAV

SEQ ID NO: 10779 - DNA, 588 bp, Chlorobium tepidum TLS
  CDS (1)..(588): transl_table=11
atgagtgtactcgtaggccgtccagccccagatttcaatgcagcagcagtcgtaaacggctcgacgttcgtcgattcctgtcagctttcagcgtatcgtggcaaatatgtcgtgctgtttttctatcctctcgacttcacctttgtttgcccgacggagttgcacgcatttcaggagaagctcgatgagttcaagaagcgcaatgtcgaggtgctcggttgctcggttgactccaaattctcgcacttcgcctggcttaacaccccgcgcagcaaaggcggcatacagggcgtgacctacccgctcatctccgacatcaacaagaccattgccaaagactacgatgtgctgactcccgatggcagtgtggcgctgaggggtctattcctgattgacaaggagggcatcgttcgccaccaggtggttaacgatctcggcatcggcaggaacatcgacgaggtgctccggatcgtcgatgcgcttcagttcaccgaggagttcggcgaggtctgcccggccaactggaacaagggcgacaagaccatgaagccgaccgacgaggggctgaaagaatacttcgcggaataa

SEQ ID NO: 10780 - protein, 195 aa, Chlorobium tepidum TLS
MSVLVGRPAPDFNAAAVVNGSTFVDSCQLSAYRGKYVVLFFYPLDFTFVCPTELHAFQEKLDEFKKRNVEVLGCSVDSKFSHFAWLNTPRSKGGIQGVTYPLISDINKTIAKDYDVLTPDGSVALRGLFLIDKEGIVRHQVVNDLGIGRNIDEVLRIVDALQFTEEFGEVCPANWNKGDKTMKPTDEGLKEYFAE

SEQ ID NO: 10781 - DNA, 594 bp, Thermosynechococcus elongatus BP-1
  CDS (1)..(594): transl_table=11
atgtctgagtgtctgcgcgtcggtcaacccgcccccgattttgaagcggttgctgtttatgaccaagagttcaaaaccatcaagctctcggactatcgcggtaagtacgttgttctctttttctatcccttggactttacctttgtctgccccacggaaattgttgcctttagcgatcgctacgatgaatttgccaaattgaacaccgaaatcctgggcgtgtctgtggatagccagttctcccacttggcttggacacaaactgatcgcaaagctggtggtgtcggcgatcttaaatatcccttggtgtctgacctgaaaaaagacatcagcactgcctacaatgtcctgaccgaagaaggcgtggccctgcggggtctgttcatcattgataaagaagggattatccaacacgcaacaatcaataacttggcctttggccgcagtgttgatgagaccctgcgggtactccaagcgattcaatacgttcaaactcaccccgatgaagtctgccccgcgggctggcaccccggtgacaagacgatgaaccctgaccctgtcaaatccaaagtctattttgaagccgtgggctaa

SEQ ID NO: 10782 - protein, 197 aa, Thermosynechococcus elongatus BP-1
MSECLRVGQPAPDFEAVAVYDQEFKTIKLSDYRGKYVVLFFYPLDFTFVCPTEIVAFSDRYDEFAKLNTEILGVSVDSQFSHLAWTQTDRKAGGVGDLKYPLVSDLKKDISTAYNVLTEEGVALRGLFIIDKEGIIQHATINNLAFGRSVDETLRVLQAIQYVQTHPDEVCPAGWHPGDKTMNPDPVKSKVYFEAVG

SEQ ID NO: 10783 - DNA, 582 bp, Leptospira interrogans serovar Lai str. 56601
  CDS (1)..(582): transl_table=11
atgcctcaggtcacatctttagcgccagattttaaggcagaagccgtccttggaaaagaaatcaaggaaattaaactttcagactacaaaggaaaatgggtagtattgttcttttacccacttgattttactttcgtttgcccgactgagatcatcgaatacgataacaaacttgcggaattcaaaaaactgggaacagaagtgttgggagtttctgtggactctgcatttactcacctcgcctggaaaaatactcctaaaaaagaaggaggaatcggcgaaattaaatatcctctcattgcggatctaaccaaatctatttccagagattataacgttttgacggaaggaggagtggctctaagagggacttttatcatcgatcccgcaggtgtaattcgtcaagcgaccatcaatgatcttccagtaggacgtaatattgatgaagcgattcgtttgatcaaagcgtttcaatttgttgaaaaacacggagaagtctgccctgccaattgggacgaaggaaagaaaacgatgaaagcagatccagaaaaatctaaggattactttgctgccgtgaattga

SEQ ID NO: 10784 - protein, 193 aa, Leptospira interrogans serovar Lai str. 56601
MPQVTSLAPDFKAEAVLGKEIKEIKLSDYKGKWVVLFFYPLDFTFVCPTEIIEYDNKLAEFKKLGTEVLGVSVDSAFTHLAWKNTPKKEGGIGEIKYPLIADLTKSISRDYNVLTEGGVALRGTFIIDPAGVIRQATINDLPVGRNIDEAIRLIKAFQFVEKHGEVCPANWDEGKKTMKADPEKSKDYFAAVN

SEQ ID NO: 10785 - DNA, 591 bp, Chlamydophila caviae GPIC
  CDS (1)..(591): transl_table=11
atggaatcgctatttattgggaaagctgccccagatttttctgtacaagcagtcgttaacggcgaagtaaagaatgtttctttaaaagattatcgtggtaaatacgttattcttttcttttatcctaaagatttcacttatgtttgtcctacagagcttcacgcttttcaagattctttagaagaatttgaaaatcgcggtgcacaaattattggttgttccgttgatgatctcgatacgcacaaacgttggttaaataccgacaaaaaagctggtggcgttaaaggcattacctatcccctagtttctgatacaactcatgaactttctaaactctatggtgttttagattccctgtcgggattatcattccgcggatctttcttgatcgataaggaaggtataatcagacatctggtcatcaacgatcttcctttgggtcgttctatagacgaagagcttcgtgtgttagacgctttgattttctatgaaaatcacggactcgtatgtcctgcaaattggcagcaagggcagaaggctatggccccgaatgaagaggggttgaaagaatatttcggaactattgattag

SEQ ID NO: 10786 - protein, 196 aa, Chlamydophila caviae GPIC
MESLFIGKAAPDFSVQAVVNGEVKNVSLKDYRGKYVILFFYPKDFTYVCPTELHAFQDSLEEFENRGAQIIGCSVDDLDTHKRWLNTDKKAGGVKGITYPLVSDTTHELSKLYGVLDSLSGLSFRGSFLIDKEGIIRHLVINDLPLGRSIDEELRVLDALIFYENHGLVCPANWQQGQKAMAPNEEGLKEYFGTID

SEQ ID NO: 10787 - DNA, 597 bp, Rhodopirellula baltica SH 1
  CDS (1)..(597): transl_table=11
atgagtgttttggtcacccaaaaagcccctgatttcaccgccaccgccgtcatgcccgatggcacgttcaaagacgacttcaagttgtcggattacaagggcaagtacgtcctgttgttcttctggccactcgacttcactttcgtctgcccaaccgaaatcatcgcgttcagcgaccgggccaaggacttcgaagacctcggcgtgaacattgtcggcgtttcgatcgacagccatttcactcacttggcatggaccaacacgccacgcaacgaaggtggcattggcaagaccgcttacccattggtcgccgacttgaacaagcaaatctcgcgtgattacgacgtgctgttggacggcggcgtcgcactgcgtggtttgttcttgatcgaccaagaaggcgttgtgcgtcaccaagtcgtcaacgacttgccgctgggccgcagcgtcgacgaagcactgcgaatggtcaaagccctccagtacttcgaaaccaatggcgaagtctgcccagccaactggcaagaaggctcgcgtacaatcaaagcggacgtggaaggcagcaaagagttcttcggcgccgaatacaaaagctaa

SEQ ID NO: 10788 - protein, 198 aa, Rhodopirellula baltica SH 1
MSVLVTQKAPDFTATAVMPDGTFKDDFKLSDYKGKYVLLFFWPLDFTFVCPTEIIAFSDRAKDFEDLGVNIVGVSIDSHFTHLAWTNTPRNEGGIGKTAYPLVADLNKQISRDYDVLLDGGVALRGLFLIDQEGVVRHQVVNDLPLGRSVDEALRMVKALQYFETNGEVCPANWQEGSRTIKADVEGSKEFFGAEYKS

SEQ ID NO: 10789 - DNA, 594 bp, Prochlorococcus marinus subsp. marinus str. CCMP1375
  CDS (1)..(594): transl_table=11
atgacagaaggatgtttaagagtcggccaaatggcacccaacttcactgcagaagctgttgtagaccaagaatttaagcagatttcactcactgattacagaggtaagtgggttgtactttttttctatccccttgattttacctttgtatgtccgacagaaataaccgcttttagcgaccgattctcagatttttcctcaaaaagcacagaaatacttggtgtgtcagttgatagcaaacattgtcatcttgcgtggatacaaactccacgcaacaggggtggaattggagatataacttatccacttgtttctgatcttaaacgtgaaatagctactgcttataatgtgcttaatgatgatggcgaggccgatagaggcctattcctaataaatccagaaggtattattatgcattgcactataaacaaggctccagtaggaagaaatgtagatgaaacattgagaatacttcaagggtatcaatatgtagcgtctaatcctgacaaagtttgtccagccaactggaatcctggagataaaacaatgcttgaggatccaaaaggaagtaaggagtatttcgctagtctataa

SEQ ID NO: 10790 - protein, 197 aa, Prochlorococcus marinus subsp. marinus str. CCMP1375
MTEGCLRVGQMAPNFTAEAVVDQEFKQISLTDYRGKWVVLFFYPLDFTFVCPTEITAFSDRFSDFSSKSTEILGVSVDSKHCHLAWIQTPRNRGGIGDITYPLVSDLKREIATAYNVLNDDGEADRGLFLINPEGIIMHCTINKAPVGRNVDETLRILQGYQYVASNPDKVCPANWNPGDKTMLEDPKGSKEYFASL

SEQ ID NO: 10791 - DNA, 585 bp, Prochlorococcus marinus subsp. pastoris str. CCMP1986
  CDS (1)..(585): transl_table=11
atgagtttaagagttggtcaagaagccccagatttcactgcaacggcagtttatgatcaagaatttaaagacattacgctttcaagttataaaggtaaatgggttgtcttgtttttctatccattagactttacttttgtttgtccaacagaaattaccgcattcagtgatgaatttaataaattctctgacttaaacactgaagttcttggagtatctgttgatagcaaacattgccatttagcttggatacaaacaccaagaaatgaaggaggtattggtgatattaactatcctttggtatcagatttgaaaagagaaatttgccaagcttacaacgtacttaatgatgatggtgaagctgatagaggtttatttcttattaatccagaaggaattgtaatgcacacgacagtgaataaagctcctgtagggagaaatgttgatgaaacactgagaatacttcagggttatcaatatgtagcagccaatcctgatgaggtctgtcctgcaaattggactccaggggagaaaacaatgctagaagatccaaaaggaagtaaagaatatttctctgccctttaa

SEQ ID NO: 10792 - protein, 194 aa, Prochlorococcus marinus subsp. pastoris str. CCMP1986
MSLRVGQEAPDFTATAVYDQEFKDITLSSYKGKWVVLFFYPLDFTFVCPTEITAFSDEFNKFSDLNTEVLGVSVDSKHCHLAWIQTPRNEGGIGDINYPLVSDLKREICQAYNVLNDDGEADRGLFLINPEGIVMHTTVNKAPVGRNVDETLRILQGYQYVAANPDEVCPANWTPGEKTMLEDPKGSKEYFSAL

SEQ ID NO: 10793 - DNA, 603 bp, Prochlorococcus marinus str. MIT 9313
  CDS (1)..(603): transl_table=11
atgacgaccaacgaatgcctacgggtgggtcagcaggccccagacttcaacgctacagctgttgttgatcaagagtttaaggaaataagcctatcccaatacagggggaagtatgtggttttattcttttatcctctagatttcacttttgtatgcccaacagaaattacagcatttagtgatcgttacactgatttctcaagccgaaacacagaggtattaggtgtttcagttgatagtcagttcagccatcttgcatggatccagacatcacgtaaggaaggaggtcttggtgacatcaactatccactaatagctgatctcaagaaagagatttcgacagcctataacgttttagatgatgaagctggagtagccctacgtggtttgtttatcattgacccagatggagtaataatgcattcaacaattaacaacctaccagtaggaaggaacgtggatgagacattacgtgtactgcaggcctttcagtatgtacagtcacatccagatgaggtatgccctgctaattggacaccaggagagaaaacaatgaaaccagatccagttggaagcaaggagttcttcgcctcaataaattaa

SEQ ID NO: 10794 - protein, 200 aa, Prochlorococcus marinus str. MIT 9313
MTTNECLRVGQQAPDFNATAVVDQEFKEISLSQYRGKYVVLFFYPLDFTFVCPTEITAFSDRYTDFSSRNTEVLGVSVDSQFSHLAWIQTSRKEGGLGDINYPLIADLKKEISTAYNVLDDEAGVALRGLFIIDPDGVIMHSTINNLPVGRNVDETLRVLQAFQYVQSHPDEVCPANWTPGEKTMKPDPVGSKEFFASIN

SEQ ID NO: 10795 - DNA, 603 bp, Synechococcus sp. WH 8102
  CDS (1)..(603): transl_table=11
atgaccgagaccggttgccttcgtgtgggccagcaggcccccgatttcactgccactgcagtggtggaccaggaattcaaggaaatctccctgtcccagtaccgcggcaagtacgtggtgctcttcttctatcccctggatttcaccttcgtctgccccacagaaatcacggccttcagcgaccgctacgccgatttctccagcaagaacaccgaagtcctcggcgtttccgttgacagccagttcagccatctggcctggattcagactccccgcaatcagggcggtctgggcgacatcaactatcccctggtcgctgacctcaagaaggaaatcgccaccgcatacaacgtgctggacgacgccgaaggcgttgctttgcgtggactgttcatcatcgatcccgatggcgtgatcatgcactccacgatcaacaacctgcctgttggccggaatgtggacgaaaccctgcgtgtgcttcaggccttccagtacgtgcagtccaaccccgatgaagtctgccccgccaactggacgcccggcgaaaagaccatgaagcccgatccgaaaggttccaaggagtatttctccgccatcggttga

SEQ ID NO: 10796 - protein, 200 aa, Synechococcus sp. WH 8102
MTETGCLRVGQQAPDFTATAVVDQEFKEISLSQYRGKYVVLFFYPLDFTFVCPTEITAFSDRYADFSSKNTEVLGVSVDSQFSHLAWIQTPRNQGGLGDINYPLVADLKKEIATAYNVLDDAEGVALRGLFIIDPDGVIMHSTINNLPVGRNVDETLRVLQAFQYVQSNPDEVCPANWTPGEKTMKPDPKGSKEYFSAIG

SEQ ID NO: 10797 - DNA, 606 bp, Geobacter sulfurreducens PCA
  CDS (1)..(606): transl_table=11
atgtgcatgtgtacgcttgttaccaaggaggcccctgacttcaccgccgacgcggttatgcccgacaataccttcggcacggtcaagctgtcgagctaccgcggaaaatatgtggtcctctttttctatcctcttgatttcacttttgtctgcccgtctgagattcttgcattcaataagaagctggatcagttcaaggctaagaactgcgaggtgatcggggtttcagtcgattccaagttcacccacatggcgtggaagaacaccccggtggagaacggcggtatcggcaacatccagtatccgctggtagccgatctcaagaaggagatcgccacccagtacggcgtcctcttcgaaggcgcaggggttgccctgcgcggcctgttccttatcgataccaagggggttgtccgtcacgccgtgatcaacgacctgcctctcggccgcagcgttgacgaggccctccgcatggtcgatgcgcttcagttcgtggaaacccacggcgatcaggtttgcccggccaactggaaggaaggggacgaggccatgaagccgaccgcttccggcgtggccgagtacctggcaaagcactccgtggggtag

SEQ ID NO: 10798 - protein, 201 aa, Geobacter sulfurreducens PCA
MCMCTLVTKEAPDFTADAVMPDNTFGTVKLSSYRGKYVVLFFYPLDFTFVCPSEILAFNKKLDQFKAKNCEVIGVSVDSKFTHMAWKNTPVENGGIGNIQYPLVADLKKEIATQYGVLFEGAGVALRGLFLIDTKGVVRHAVINDLPLGRSVDEALRMVDALQFVETHGDQVCPANWKEGDEAMKPTASGVAEYLAKHSVG

SEQ ID NO: 10799 - DNA, 594 bp, Ashbya gossypii ATCC 10895
  CDS (1)..(594)
atggtcgcccaggttcaaaagcaagccccagcattcaagaagaccgccgtcatcgacggtgtgttcgatgaggtttccttggagaaatacaagggcaagtacgttgtcttggccttcatcccattggccttcacctttgtgtgcccaactgagatcgttgccttctctgacgccgctaagaagttcgaggacttgggtgcgcaagtgttgtttgcttccaccgactctgagtactcgttgttggcttggaccaacattgccagaaaggacggtggtctaggtaacgtgaacattcctcttgttgccgacaccaaccactccttgtcccgcgactacggcgtgttgatcgaggaggagggcattgccttgagaggtctattcgtgatcgaccctaagggcgtggtcagacacatcaccattaacgacttgccagtcggcagaaacgtcgacgaggccttgagattggttgagggcttccagtggaccgacaagaacggcactgtcttgccatgcaactggactccaggtgctgctactatcaagcctgatgttgctgcctccaaggagtacttcagcgaggcccacaaggactaa

SEQ ID NO: 10800 - protein, 197 aa, Ashbya gossypii ATCC 10895
MVAQVQKQAPAFKKTAVIDGVFDEVSLEKYKGKYVVLAFIPLAFTFVCPTEIVAFSDAAKKFEDLGAQVLFASTDSEYSLLAWTNIARKDGGLGNVNIPLVADTNHSLSRDYGVLIEEEGIALRGLFVIDPKGVVRHITINDLPVGRNVDEALRLVEGFQWTDKNGTVLPCNWTPGAATIKPDVAASKEYFSEAHKD

SEQ ID NO: 10801 - DNA, 594 bp, Pichia stipitis CBS 6054
  CDS (1)..(594): transl_table=12
atggttgccctcatccaaaagccagctccagccttcaagaagactgccgtcgttgacggtgtctttgaagaagtcactcttgaacaatacaagggtaagtgggtcctcttggctttcatcccattggccttcaccttcgtttgcccaactgaaatcattgcctactctgaggccatcaagaagttccaagacaaggacgctgaagtcttgtttgcttccaccgactcggaatactctctcttggcctggaccaacgttgccagaaaggacggtggtttgggtccaatcaacatcccattgttggccgacaccaaccactccttgtccaaggactacggtgtcttgctcgaagaagaaggtgttgccctcagaggtatcttcttgatcgatccaaagggtgtcttgagacagatcaccgtcaacgacttgccagtcggtagatccgttgaagagtccttgagattgttggaagccttccaattcaccgaaaagtacggtgaagtgtgtcctgccaactggactcctggtgccgagaccatcaagccagaagttagctcctccaaggaatacttcggtaaggtcaacaaggattag

SEQ ID NO: 10802 - protein, 197 aa, Pichia stipitis CBS 6054
MVALIQKPAPAFKKTAVVDGVFEEVTLEQYKGKWVLLAFIPLAFTFVCPTEIIAYSEAIKKFQDKDAEVLFASTDSEYSLLAWTNVARKDGGLGPINIPLLADTNHSLSKDYGVLLEEEGVALRGIFLIDPKGVLRQITVNDLPVGRSVEESLRLLEAFQFTEKYGEVCPANWTPGAETIKPEVSSSKEYFGKVNKD

SEQ ID NO: 10803 - DNA, 591 bp, Lodderomyces elongisporus NRRL YB-4239
  CDS (1)..(591)
atggctccagttattcaaaaaccagctccatcattcaagaagaccgccgttgttgacggtgtctttgaagaggtttccttggaacaatacaagggcaaatgggtcctcttggcttttttcccattggcctggacttttgtctgcccaactgaaattattgcctactctgaggcattcaagaagtttgccgacaaggatgcagttgttttgtttgcatctaccgactctgagtacactttgttgtcatggaccaatgctgccagaaaagatggtggtttgggacaattgaacattccattgattgcagacaccaatcactctttgtccaaggactatggcgtcttgattccagaagaaggtgttgccttgagaggtatctttttgattgacccaaagggtgtcttgagacaaatcaccatcaacgacttgccagttggtagatctgttgaagagtctttgagattgttggaggctttccaatttaccgagaaatatggtgaagtttgcccagccaactggcaaccaggctcagaaaccattaaggctacaccaaatgactctaaagagtacttctcgaaggtcaacaaataa

SEQ ID NO: 10804 - protein, 196 aa, Lodderomyces elongisporus NRRL YB-4239
MAPVIQKPAPSFKKTAVVDGVFEEVSLEQYKGKWVLLAFFPLAWTFVCPTEIIAYSEAFKKFADKDAVVLFASTDSEYTLLSWTNAARKDGGLGQLNIPLIADTNHSLSKDYGVLIPEEGVALRGIFLIDPKGVLRQITINDLPVGRSVEESLRLLEAFQFTEKYGEVCPANWQPGSETIKATPNDSKEYFSKVNK

SEQ ID NO: 10805 - DNA, 591 bp, Vanderwaltozyma polyspora DSM 70294
  CDS (1)..(591)
atggtcgctcaagttcaaaagccagctccaaccttcaagaagactgctgtcgttgatggtgttttcgaagaagtttctttggaacaatacaaaggtaagtacgttgtcttagctttcatcccattagctttcactttcgtttgcccaactgaaattgttgctttctctgacgctgtcaagagattcgaagctttgaacacacaagttttattcgcttctaccgattctgaatactctttgttagcttggactaacgttgctagaaaagatggtggtctaggtccagtcgacatcccattattggctgacaccaaccacaccttatccagagattacggtgttttgatcgaagaagaaggtattgctttaagaggtttattcttgatcgatccaaagggtaacgttagacacattaccatcaacgatttaccagtcggtagaaacgttgaagaagctttaagattagtcgaaggtttccaatggaccgacaagaacggtaccgttttgccatgtaactggaccccaggttccgctactatcaagccaactgttgaagcttccaaggaatacttcaatgaagctaacaaataa

SEQ ID NO: 10806 - protein, 196 aa, Vanderwaltozyma polyspora DSM 70294
MVAQVQKPAPTFKKTAVVDGVFEEVSLEQYKGKYVVLAFIPLAFTFVCPTEIVAFSDAVKRFEALNTQVLFASTDSEYSLLAWTNVARKDGGLGPVDIPLLADTNHTLSRDYGVLIEEEGIALRGLFLIDPKGNVRHITINDLPVGRNVEEALRLVEGFQWTDKNGTVLPCNWTPGSATIKPTVEASKEYFNEANK

SEQ ID NO: 10807 - DNA, 708 bp, Chlamydomonas reinhardtii
  CDS (1)..(708)
atggccgctctgcagtctgcttcccgctcttcggcggtggccttctcgcgccaggcgcgcgtggccccgcgcgttgccgccagcgttgctcgtcgcagcctggtcgtgcgcgcttcccacgccgagaagcccctggtgggctccgtggcccctgacttcaaggcccaggccgtgttcgaccaggagttccaggagattaccctgagcaagtaccgtggcaagtacgtggtgctgttcttctaccccctggacttcaccttcgtgtgccccaccgagatcactgccttctcggaccgctacaaggagttcaaggacatcaacaccgaggttctgggtgtgtctgtggacagccagttcacccacctggcctggattcagaccgaccgcaaggagggtggcctgggcgacctggcctaccccctggtggctgacctgaagaaggagatctccaaggcctacggcgtcctgaccgaggacggcatctccctgcgcggcctgttcatcatcgacaaggagggcgttgtgcagcacgccaccatcaacaacctggctttcggccgctcggtcgacgagaccaagcgtgtgctgcaggccatccagtacgtgcagtccaaccccgatgaggtctgccccgccggctggaagcccggtgacaagaccatgaagcccgaccccaagggctccaaggagtacttctctgccgtgtaa

SEQ ID NO: 10808 - protein, 235 aa, Chlamydomonas reinhardtii
MAALQSASRSSAVAFSRQARVAPRVAASVARRSLVVRASHAEKPLVGSVAPDFKAQAVFDQEFQEITLSKYRGKYVVLFFYPLDFTFVCPTEITAFSDRYKEFKDINTEVLGVSVDSQFTHLAWIQTDRKEGGLGDLAYPLVADLKKEISKAYGVLTEDGISLRGLFIIDKEGVVQHATINNLAFGRSVDETKRVLQAIQYVQSNPDEVCPAGWKPGDKTMKPDPKGSKEYFSAV

SEQ ID NO: 10809 - DNA, 849 bp, Physcomitrella patens subsp. patens
  CDS (1)..(849)
atggcgtgtgctgcagcagcctccggcgtcacgctccccgcgggcaacatcgcccatgctcgccctgcggccttttcgtcctctgcctccggcgcatcctcctctttgtccgtgcggaagtcgttctccggactgagcaaaagctttgctgctcgcctggctgctaccaatgcacccactggcaaggctgcttcggcagctggagtcaagatcgcgtcgcagaagcggggtgtgatcactgcttcggcgcaggacagctacgagccactcattggtaatgttgccccagacttcgaggcggaggctgtgttcgaccaggaatttattaaggttaagctgtccgagtacattggaaagaagtacgtcgtattgttcttctaccctttggacttcacattcgtatgtccaacagaaatcactgccttcagtgacaggtacagcgaattcgagaagctaagcacggaagttatcggtgtttccactgacagcgtgttctctcacctcgcctggatccaaactgatagaaaggcaggagggctcggggacctgcattatcccatcgtctcggacattaccaaaaagatttctaggtcatttaatgtactgattccggagcagggcatcgcactgaggggtctattcatcattgacaaacagggagtgatccagcacgcaaccgtcaacaaccttggtattgggcgaagcgttgacgaaactctgcggactctgcaggccgtacagtacgtgcaagataacccagacgaggtgtgccctgctggctggaagcctggggaaaaaacgatgaagcctgactcgaagctaagcaaggagtatttcgaggccatctga

SEQ ID NO: 10810 - protein, 282 aa, Physcomitrella patens subsp. patens
MACAAAASGVTLPAGNIAHARPAAFSSSASGASSSLSVRKSFSGLSKSFAARLAATNAPTGKAASAAGVKIASQKRGVITASAQDSYEPLIGNVAPDFEAEAVFDQEFIKVKLSEYIGKKYVVLFFYPLDFTFVCPTEITAFSDRYSEFEKLSTEVIGVSTDSVFSHLAWIQTDRKAGGLGDLHYPIVSDITKKISRSFNVLIPEQGIALRGLFIIDKQGVIQHATVNNLGIGRSVDETLRTLQAVQYVQDNPDEVCPAGWKPGEKTMKPDSKLSKEYFEAI

SEQ ID NO: 10811 - DNA, 699 bp, Culex quinquefasciatus
  CDS (1)..(699)
atgtcgttcgcaactaaagccctgctccgcaacattccgcagttatccaagctggccagctccggaaccgtccagaagaacctgttccatactgcccgcgctctgagtgtcgctcaagtccaaaagccggctcctccattcagcggaacggccgtcgtcaacaatgacttcaaggaaatcaaactggccgacttcaaaggaaagtatctggtgctgttcttctacccgttggatttcacctttgtctgtcccacggagatcatcgccttcagtgatcgcatcaaagatttccacgcgctgaacgccgaagtcgtcggagtgtccgtcgattcgcacttttctcacctggcctggtgcaacacgccacgaaagagcggcggtcttggcaagctcgagtacccgttgctggccgatctgaccaagaaaatttccgccgattacggtgtgctgctggaggaggccggaatctcgctccgtggtctgttcattatcgatccgaacggagtggtgcgtcaggttacgatcaacgatctgcccgtgggccgctcggtcgacgaaacgttgcgcctgattaaggcgttccagtttgtggaaaagcacggcgaagtttgcccggccaattgggacccaaaggccaacgccgacaccatcaagccggacccgaagggatcgaaggaatatttcaataagcatggttag

SEQ ID NO: 10812 - protein, 232 aa, Culex quinquefasciatus
MSFATKALLRNIPQLSKLASSGTVQKNLFHTARALSVAQVQKPAPPFSGTAVVNNDFKEIKLADFKGKYLVLFFYPLDFTFVCPTEIIAFSDRIKDFHALNAEVVGVSVDSHFSHLAWCNTPRKSGGLGKLEYPLLADLTKKISADYGVLLEEAGISLRGLFIIDPNGVVRQVTINDLPVGRSVDETLRLIKAFQFVEKHGEVCPANWDPKANADTIKPDPKGSKEYFNKHG

SEQ ID NO: 10813 - DNA, 759 bp, Culex quinquefasciatus
  CDS (1)..(759)
atgaagtcgattccggtgcggccccttctaatgctggccgcggtcacgttcgtttgtcttccacagagttcggcttcgacgcagctcgacgagggatcgtgccattcgtttgccggtggccatgtctacccgcaggaggacgtccgctcggcggatcacaagctgcagtggacgaaggcggtcatttcgcggcctgcgccacagtttgaggcgacggccgtcgtagagggggcgtttaagaagatcaagctgtcggactatcgtggaaagtatctggtgttcttcttttacccgctggactttacgtttgtgtgccccacggagattctggccttttcggacagggttagtgagtttaagaagctgaacgcggaggtcatagcggccagcatcgattcgcactttacgcatctggcctggatcaacacgccgcggaaggagggcggtctcggcaagatcaacattccactggtcagcgacatcacgcacagcatcgccaaggattacggcgtgtatctggacgatttgggccacaccctgcggggactgttcatcatcgacgatcgtggcattctgcggcagattacgatgaacgatttgcccgtgggccgatcggtggacgaaacgctgcggctggtgcaggccttccagtacacggacaaacacggcgaggtgtgccccgccgggtggaagcccggacaggatacgattgtgccaaacccggaggaaaaaatcaagtactttgagaagaaccactaa

SEQ ID NO: 10814 - protein, 252 aa, Culex quinquefasciatus
MKSIPVRPLLMLAAVTFVCLPQSSASTQLDEGSCHSFAGGHVYPQEDVRSADHKLQWTKAVISRPAPQFEATAVVEGAFKKIKLSDYRGKYLVFFFYPLDFTFVCPTEILAFSDRVSEFKKLNAEVIAASIDSHFTHLAWINTPRKEGGLGKINIPLVSDITHSIAKDYGVYLDDLGHTLRGLFIIDDRGILRQITMNDLPVGRSVDETLRLVQAFQYTDKHGEVCPAGWKPGQDTIVPNPEEKIKYFEKNH

SEQ ID NO: 10815 - DNA, 660 bp, Laccaria bicolor S238N-H82
  CDS (1)..(660)
atggttgccctcgttcagcgcccagcgcccgctttcaaggctgaagcagtcgctaaaggcaccttcttggacatttcttcgagtgacttccttggccagtgggttgtcctcctattctatcctatggacttcaccttcgtctgccctacggagatccttgcgttcaacgacgccttgccccgcttcaaagagctgaatacaacggtcttcggcgtttcaaccgactccaagttctcccacttggcgtgggctaaccagccacgcaaagaaggtggtcttggtcctgatttgaagcttcccctcttggcggacaggtccatgcgaatctcccgtgactacggcgtacttcttgaggacgagggtattgctctgcgtggcctattcattattgatcccaagggtattctgaggcaaatcactgtcaatgaccttcctgtaggccgttcggtcgaagaaaccattcgtctaattcaagccttccaattcacggacgcctatggcgaggtttgccccgcgaactggactgaaggttccaagaccatcaaagctgaccctgttgccaaattagaatacttcactgccgtgaccgatggtcagtccaataaccatgttaatggtgaggcgaatggctctgtcaagaagcgcgcccgcgtcgactga

SEQ ID NO: 10816 - protein, 219 aa, Laccaria bicolor S238N-H82
MVALVQRPAPAFKAEAVAKGTFLDISSSDFLGQWVVLLFYPMDFTFVCPTEILAFNDALPRFKELNTTVFGVSTDSKFSHLAWANQPRKEGGLGPDLKLPLLADRSMRISRDYGVLLEDEGIALRGLFIIDPKGILRQITVNDLPVGRSVEETIRLIQAFQFTDAYGEVCPANWTEGSKTIKADPVAKLEYFTAVTDGQSNNHVNGEANGSVKKRARVD

SEQ ID NO: 10817 - DNA, 579 bp, Schizosaccharomyces japonicus yFS275
  CDS (1)..(579)
atgactttgagaattggacaacccgctcccgacttcaagggtaccgccgtcgtcaacggctccttcgaggagattaagctctctgactacaagggcaagtgggtcttcttgggtttctaccccatggacttcaccttcgtctgccccaccgagattgttgctttctctgaggctgcctccaagtttgctgagcgcaacgcccaagtcatcttggcctctaccgactctgagtactctcaccttgccttcatcaacactccccgcaaggagggtggtctcggcggcattaagattcccttgttggccgaccattcccacaagatctctcgcgactacggtgtcctcatcgaggacgctggcatcgccttccgtggtctcttcctgattgaccccaacggaatcttgcgtcaaatcaccgtcaacgatcttcccgtcggtcgctctgtcgaagaggctctccgtctcttggacgccttcatcttcgtcgaggagcacggcgaggtctgccccgccaactggcacaagggtgctgacaccatcgacaccaagaaccccgacaagtacttctccaagcactaa

SEQ ID NO: 10818 - protein, 192 aa, Schizosaccharomyces japonicus yFS275
MTLRIGQPAPDFKGTAVVNGSFEEIKLSDYKGKWVFLGFYPMDFTFVCPTEIVAFSEAASKFAERNAQVILASTDSEYSHLAFINTPRKEGGLGGIKIPLLADHSHKISRDYGVLIEDAGIAFRGLFLIDPNGILRQITVNDLPVGRSVEEALRLLDAFIFVEEHGEVCPANWHKGADTIDTKNPDKYFSKH

SEQ ID NO: 10819 - DNA, 825 bp, Vitis vinifera
  CDS (1)..(825)
atggcctgctcggctccttcaacccccaccactctcctctcttccaaccccagggcttttccttccaaatccctatccaccgtggcttcattttccaagcccctctctccccaaaccctaaccatccccaattccttcaatcctctgcgcaagccctttcaatctccggtcccccgctccatttcctcccgtggctctcactccagacgtagcctcgttgtcagggctagtagtgaagctccactggttgggaataaggcaccggattttgaggcagaagctgtttttgatcaggagttcatcaaggttacactttcagagtatattgggaagaaatatgtgattctctttttctacccactggacttcacatttgtttgtcctacagagatcactgctttcagtgaccgctatgaagagtttgagaagttaaacacagaaatattgggtgtttctattgacagtgtgttctcgcaccttgcatgggtccaaacagatagaaagtcaggtggccttggtgatctcaagtatcccctggtctctgatgtcactaagtcaatttcaaaatcttatgatgtgctgattccagatcagggagttgcactcagggggcttttcattattgacaaggaaggaattattcagcacgccactatcaacaatcttgccattgggcggagcgtcgatgagacaatgagaacactccaggcattacagtatgtgcaagagaacccagatgaagtttgcccagctgggtggaagcctggagagaagtccatgaagccagatcccaagctcagcaaggaatattttgcagcaatataa

SEQ ID NO: 10820 - protein, 274 aa, Vitis vinifera
MACSAPSTPTTLLSSNPRAFPSKSLSTVASFSKPLSPQTLTIPNSFNPLRKPFQSPVPRSISSRGSHSRRSLVVRASSEAPLVGNKAPDFEAEAVFDQEFIKVTLSEYIGKKYVILFFYPLDFTFVCPTEITAFSDRYEEFEKLNTEILGVSIDSVFSHLAWVQTDRKSGGLGDLKYPLVSDVTKSISKSYDVLIPDQGVALRGLFIIDKEGIIQHATINNLAIGRSVDETMRTLQALQYVQENPDEVCPAGWKPGEKSMKPDPKLSKEYFAAI

SEQ ID NO: 10821 - DNA, 792 bp, Populus trichocarpa
  CDS (1)..(792)
atggcctgctcggcaacttctacctctttcatctcctctatcgccgccgccaaatccatggccactcctctctctaaaaccctaactctccccaactccttctctggtacacggaaatctatccaatctcccgtcctccgttccatttccctgacccgcggctctcattctgcaaagtccttcgttgtcaaagcctctagtgaacttccattggttggaaacgtagcaccggatttcgaggctgaggctgttttcgatcaagagtttattaaggttaaactatctgaatatatcgggaacaaatatgtggttctatttttctatccattggacttcacatttgtttgtcccacagaaatcactgcttttagtgaccgttatgaggaattcaagcagataaacacagaagtattgggtgtttcagttgacagtgtgttctcgcaccttgcctgggtccaaacagatagaaagtctggtgggcttggagatttgaagtatcctttgatttctgatgtcaccaaatccatttcaaaatcttatggagtgttaatccctgatcagggagttgctctgagaggactttttatcattgataaagaaggagtcatccaacactccaccattaacaaccttgccattgggcgtagtgttgacgagacaaagagaacactccaggccttgcagtatgtgcaagaaaatccagatgaagtttgcccagctgggtggaagcctggtgacaagtccatgaaacctgacccaagacagagcaaggattactttgccgcattgtag

SEQ ID NO: 10822 - protein, 263 aa, Populus trichocarpa
MACSATSTSFISSIAAAKSMATPLSKTLTLPNSFSGTRKSIQSPVLRSISLTRGSHSAKSFVVKASSELPLVGNVAPDFEAEAVFDQEFIKVKLSEYIGNKYVVLFFYPLDFTFVCPTEITAFSDRYEEFKQINTEVLGVSVDSVFSHLAWVQTDRKSGGLGDLKYPLISDVTKSISKSYGVLIPDQGVALRGLFIIDKEGVIQHSTINNLAIGRSVDETKRTLQALQYVQENPDEVCPAGWKPGDKSMKPDPRQSKDYFAAL

SEQ ID NO: 10823 - DNA, 810 bp, Populus trichocarpa
  CDS (1)..(810)
atggcctgctcagctacctccaccactctcatctcctctatcgccgccgccgccaccgccaccaccaccaaatccatggcctttcctatctctaaaaacataactctccccaactcattttttggcactcgcaaatccttccaatctcgcgtccctcgttccatttccttgactcgtggctctcattctagaagcaccttcgttgtcaaagcctctagcgaacttccattggtcggaaacatagcaccggatttcgaggcggaggctgtcttcgatcaagagttcattaatgttaaactgtctgattatattgggaagaaatatgtgattctatttttctatccattggacttcacatttgtttgtcccacagaaatcactgcttttagtgaccgtcatgaggaatttgagcagataaacacagaagtgttgggtgtttcaatcgacagtgtgttctcgcaccttgcctgggtccaaacggatagaaagtctggtgggcttggagatttgaagtatcctttgatttctgatgtcaccaaatccatttcaaaatcttatggagtgctaattcctgatcagggagttgctctgagaggacttttcatcattgataaagaaggagtcatccaacattccaccattaacaaccttgccattgggcgtagtgttgacgagacgaagaggacactccaggccttgcagtatgtgcaagaaaatccagatgaagtttgcccagctgggtggaagcctggtgagaagtccatgaagcctgatccaaagctgagcaaggattactttgctgccatatag

SEQ ID NO: 10824 - protein, 269 aa, Populus trichocarpa
MACSATSTTLISSIAAAATATTTKSMAFPISKNITLPNSFFGTRKSFQSRVPRSISLTRGSHSRSTFVVKASSELPLVGNIAPDFEAEAVFDQEFINVKLSDYIGKKYVILFFYPLDFTFVCPTEITAFSDRHEEFEQINTEVLGVSIDSVFSHLAWVQTDRKSGGLGDLKYPLISDVTKSISKSYGVLIPDQGVALRGLFIIDKEGVIQHSTINNLAIGRSVDETKRTLQALQYVQENPDEVCPAGWKPGEKSMKPDPKLSKDYFAAI

SEQ ID NO: 10825 - DNA, 591 bp, Yarrowia lipolytica CLIB122
  CDS (1)..(591)
atggtcgccactgttcagcatcccgcccccgacttcaagaagactgccgtctctggtggtgtcttcgaggaggtctccctcgaccagttcaagggtaagtgggttgtcctcgccttcatccccctggctttcaccttcgtctgccccaccgagatcatcgcttactccgatgccgtctctcagttcaaggagcgaggcgccgaggttctctttgcctccaccgactccgagtactctctgcttgcctggaccaacgttgcccgaaaggatggtggtcttggtcccgtcaacatccccctgcttgctgacaccaaccacaccctgtccaaggactacggtgttctcatccccgaggccggtgtcgctctccgaggtatcttcatcattgaccccaagggcgttgtccgacagatcaccatcaacgatctccccgttggccgatccgtcgaggagaccctccgactcatcgatgccttccagttcactgagaagcacggtgaggtctgccccgccaactggcagaagggctccgatactatcaaggctgaccctgtcaacgccaaggagtacttcgagaaggccaacaaataa

SEQ ID NO: 10826 - protein, 196 aa, Yarrowia lipolytica CLIB122
MVATVQHPAPDFKKTAVSGGVFEEVSLDQFKGKWVVLAFIPLAFTFVCPTEIIAYSDAVSQFKERGAEVLFASTDSEYSLLAWTNVARKDGGLGPVNIPLLADTNHTLSKDYGVLIPEAGVALRGIFIIDPKGVVRQITINDLPVGRSVEETLRLIDAFQFTEKHGEVCPANWQKGSDTIKADPVNAKEYFEKANK

SEQ ID NO: 10827 - DNA, 585 bp, Prochlorococcus marinus str. AS9601
  CDS (1)..(585): transl_table=11
atgagcttaagagttggccaagaagcaccagactttagtgctacagcagtatatgatcaagagtttaaggaggttacactttcaggtctaagaggtaaatgggttgttttattcttctacccactagattttacatttgtatgtccaactgaaattactgcatttagtgatagataccaagatttctcagctcttaatactgaaatacttggagtgtcagttgatagcaaacactgtcatttggcttggatacaaaccccaagaaatgaaggcggaataggtgatattaactacccattagtttctgacttaaaaagagaaatttgccaggcttacaatgttcttaatgatgatggagaggccgatagaggtttatttcttatcaatcccgaaggagtagttatgcatacgactgttaacaaggctcctgtaggtagaaatgtcgatgaaacgctaaggattcttcaaggctatcaatacgttgcggcaaaccccgatgaagtatgtccagcaaactggacccctggggagaaaacaatgttagaggacccaaaaggtagtaaggaatatttttctgcgctataa

SEQ ID NO: 10828 - protein, 194 aa, Prochlorococcus marinus str. AS9601
MSLRVGQEAPDFSATAVYDQEFKEVTLSGLRGKWVVLFFYPLDFTFVCPTEITAFSDRYQDFSALNTEILGVSVDSKHCHLAWIQTPRNEGGIGDINYPLVSDLKREICQAYNVLNDDGEADRGLFLINPEGVVMHTTVNKAPVGRNVDETLRILQGYQYVAANPDEVCPANWTPGEKTMLEDPKGSKEYFSAL

SEQ ID NO: 10829 - DNA, 585 bp, Prochlorococcus marinus str. MIT 9515
  CDS (1)..(585): transl_table=11
atgagtttaagagttggccaagaagcaccaaatttcactgcaacagcagtttatgatcaagaatttaaagagataactctttcaagttacaaaggtaagtgggttgttttattcttctatccactagattttacatttgtatgtccaactgaaattactgcctttagtgatgaatacgaaaaattttctgcattaaataccgaaatactcggagtatccgtagatagtaagcattgtcatttagcatggatacaaacaccaagaaatgaaggtggtattggtgatattaattatccattagtttcagatttaaaacgagaaatttgccaagaatacaatgttcttaatgatgatggagaagcagataggggtttattccttattaatccgcaaggaatagtaatgcataccacagtaaataaagcacctgtaggacgtaatgtagacgaaacgttaaggatacttcaaggctaccaatatgttgcagctaatcctgatgaggtctgtcccgcaaactggactccaggagaaaaaacaatgttagaagatccaaaaggaagtaaagaatacttttctgcactctag

SEQ ID NO: 10830 - protein, 194 aa, Prochlorococcus marinus str. MIT 9515
MSLRVGQEAPNFTATAVYDQEFKEITLSSYKGKWVVLFFYPLDFTFVCPTEITAFSDEYEKFSALNTEILGVSVDSKHCHLAWIQTPRNEGGIGDINYPLVSDLKREICQEYNVLNDDGEADRGLFLINPQGIVMHTTVNKAPVGRNVDETLRILQGYQYVAANPDEVCPANWTPGEKTMLEDPKGSKEYFSAL

SEQ ID NO: 10831 - DNA, 603 bp, Prochlorococcus marinus str. MIT 9303
  CDS (1)..(603): transl_table=11
atgacgaccaacgaatgcctaagggtgggtcagcaggccccagacttcagtgctacagctgttgttgatcaagagtttaaggaaataagcctttcccagtacaggggtaagtatgtggttttattcttttatcctctagatttcacttttgtatgcccaacagaaattacagcatttagtgatcggtacactgatttctcaagccgaaatacagaggtcttaggggtttcagttgatagtcaattcagccatcttgcatggatccagacatcacgtaaggagggagggctcggtgacattaactatccattaatagctgatctcaagaaagagatatctacggcctataacgttttagatgatgctgctggagtagccctccgtggtttgtttatcattgacccagatggagtaataatgcattcaacaatcaacaacttaccggtaggaaggaacgtggatgagacattacgtgtactgcaggcctttcagtatgtacagtcacatccagatgaggtatgcccagctaattggacaccaggagagaaaacaatgaaaccagacccagttggaagtaaggagttcttcgcctcaataaattaa

SEQ ID NO: 10832 - protein, 200 aa, Prochlorococcus marinus str. MIT 9303
MTTNECLRVGQQAPDFSATAVVDQEFKEISLSQYRGKYVVLFFYPLDFTFVCPTEITAFSDRYTDFSSRNTEVLGVSVDSQFSHLAWIQTSRKEGGLGDINYPLIADLKKEISTAYNVLDDAAGVALRGLFIIDPDGVIMHSTINNLPVGRNVDETLRVLQAFQYVQSHPDEVCPANWTPGEKTMKPDPVGSKEFFASIN

SEQ ID NO: 10833 - DNA, 585 bp, Prochlorococcus marinus str. MIT 9301
  CDS (1)..(585): transl_table=11
atgagcttaagagttggccaagaagcaccagactttagtgctacagcagtatatgatcaagagtttaaggagattacactttcaggtctaagaggtaaatgggttgttttatttttttacccactagattttacatttgtatgtcctactgaaatcactgcatttagtgatagataccaagatttctcagctcttaatacggaaatacttggggtatcagttgatagcaaacactgtcatttagcttggatacaaaccccaagaaatgaaggtggaattggtgatattaactatccgttggtttctgacttaaaaagagaaatttgccaagcgtacaatgttcttaatgatgatggagaggccgatagagggttatttcttatcaatcccgaaggaatagttatgcatacgactgttaacaaggctccagtaggaagaaatgttgatgaaacgctaaggattcttcaaggttatcaatacgttgccgcaaacccagatgaagtatgcccagcgaactggaccccgggtgagaaaacaatgttagaggaccccaaaggtagtaaggaatatttttctgcgttatag

SEQ ID NO: 10834 - protein, 194 aa, Prochlorococcus marinus str. MIT 9301
MSLRVGQEAPDFSATAVYDQEFKEITLSGLRGKWVVLFFYPLDFTFVCPTEITAFSDRYQDFSALNTEILGVSVDSKHCHLAWIQTPRNEGGIGDINYPLVSDLKREICQAYNVLNDDGEADRGLFLINPEGIVMHTTVNKAPVGRNVDETLRILQGYQYVAANPDEVCPANWTPGEKTMLEDPKGSKEYFSAL

SEQ ID NO: 10835 - DNA, 564 bp, Geobacillus thermodenitrificans NG80-2
  CDS (1)..(564): transl_table=11
atggcagagcgcttagtcggaaaacaagctccacgttttgaaatggaggctgtcctgccgaatggagagtttggccgtgtcagccttgaggaaaacatgaaaaatggcaaatggacggtgctgttcttctatccactcgactttacattcgtttgcccgacggaaattacagcgatatctgaccgctatcatgaatttgaagacttaaatgcagtcgtgatcggtgtatcgactgactctgtttactcgcataaagcatggatgaacgtaccgcgaaaccaaaacggcatcggtcaaattaaatacccgctcgctgctgatcggacgcagcaagtttcgcgtgattacggcgtgctcattgaagaagagggggtcgcactgcgcggtttgttcatcatcgatccggacggtgagttgaaatatgccgtcattcaccataacaatatcggccgcgatgtcgatgaagtattgcgcgtgctgcaagcgttgcaaaccggcggcctctgccctgcaaactggaagccaggacaaccgacgttgacgctgcaaggagagtcgcattga

SEQ ID NO: 10836 - protein, 187 aa, Geobacillus thermodenitrificans NG80-2
MAERLVGKQAPRFEMEAVLPNGEFGRVSLEENMKNGKWTVLFFYPLDFTFVCPTEITAISDRYHEFEDLNAVVIGVSTDSVYSHKAWMNVPRNQNGIGQIKYPLAADRTQQVSRDYGVLIEEEGVALRGLFIIDPDGELKYAVIHHNNIGRDVDEVLRVLQALQTGGLCPANWKPGQPTLTLQGESH

SEQ ID NO: 10837 - DNA, 591 bp, Chlorobium phaeovibrioides DSM 265
  CDS (1)..(591): transl_table=11
atgagtgtccttgttggccgtaaagcgcctgaattcaatgtggaggccgttgttggcggctcacagtttgttgattcatgtaaactgagtgatttcagaggacagtatgttgtcctttttttctatcccctcgactttacctttgtctgcccgacagagctgcacgctttccaggagaagcttgaggagttcaagaaacggaatgtggaggttctcggctgctcggtagattccaagttttcgcatctggcctggctgaacacgccgcacaaccggggaggtattcagggtgtgacctatactttgctttcagatctcaacaaaaccgtgtcggcagattatgatgtgctggcagagggtgcgggcgttgccttgcggggtctcttcctgattgattgcgaaggcgttgtgcgtcatcaggttgtcaacgatctggggcttggccgcaatgtggatgaggtgctgagaatggtggatgcgcttcagtttacagagcagttcggtgaggtatgcccggcaaactggaacaagggcgataaagccatgaagccgaccgatgaagggctgaaggatttcttcaaaaacgattga

SEQ ID NO: 10838 - protein, 196 aa, Chlorobium phaeovibrioides DSM 265
MSVLVGRKAPEFNVEAVVGGSQFVDSCKLSDFRGQYVVLFFYPLDFTFVCPTELHAFQEKLEEFKKRNVEVLGCSVDSKFSHLAWLNTPHNRGGIQGVTYTLLSDLNKTVSADYDVLAEGAGVALRGLFLIDCEGVVRHQVVNDLGLGRNVDEVLRMVDALQFTEQFGEVCPANWNKGDKAMKPTDEGLKDFFKND

SEQ ID NO: 10839 - DNA, 603 bp, Synechococcus sp. WH 7803
  CDS (1)..(603): transl_table=11
atgaccgccaacggttgtctgcgcgtgggccaacaagcccccgacttcaccgccacagcagtggttgaccaggaattcaaggagatcagcctgtcccagtaccgcggcaagtacgtggtgctgttcttttaccctctcgacttcaccttcgtgtgccccacggagatcacggcattcagcgatcgctacgccgatttctccagcaagaacaccgaggttctgggcgtgtccgtggacagccagttcagccacctcgcctggattcagacaccccgcaaccagggtggtctcggcgacatcaactacccgctggtcgctgatctcaagaaagagatcgctagcgcctacaacgtgctggacgacgaggaaggtgttgcgctgcgcggcctgttcatcatcgaccccgagggtgtgatcatgcacgccacgatcaacaacctccccgttggccgtaacgttgacgagacgctccgcgttctccaggcattccagtacgtgcagtcccaccccgatgaggtctgccccgccaactggactcccggcgagaagaccatgaagcctgatcccgtgggaagcaaggagttcttcgccgctgtgaactga

SEQ ID NO: 10840 - protein, 200 aa, Synechococcus sp. WH 7803
MTANGCLRVGQQAPDFTATAVVDQEFKEISLSQYRGKYVVLFFYPLDFTFVCPTEITAFSDRYADFSSKNTEVLGVSVDSQFSHLAWIQTPRNQGGLGDINYPLVADLKKEIASAYNVLDDEEGVALRGLFIIDPEGVIMHATINNLPVGRNVDETLRVLQAFQYVQSHPDEVCPANWTPGEKTMKPDPVGSKEFFAAVN

SEQ ID NO: 10841 - DNA, 600 bp, Synechococcus sp. RCC307
  CDS (1)..(600): transl_table=11
atgaccaccggcgtcttccgcgttggcctgcaggcccccgatttcaccgccaccgcagtggttgaccaagagttcaaggacatctccctatcccagtaccgcggcaagtacgtggtgctgttcttttaccccctcgatttcacctttgtctgcccaacggagatcacagcgttctccgatcgctacgacgccttcaaagcactgaacaccgaagtgctgggtgtctccgtcgacagccagttcagtcacctggcctggatccaaactgagcgcaagcaaggtggtcttggcgacattgcctacccactggttgctgacctcaaaaaggagattgctagcgcctacaacgtcctcgatgaagccgaaggcgttgccctacgcggtttgttcatcatcaatcccgagggtgtggtccagcacgccaccgtcaacaacctgccagtgggccgcaacgtggaggaaaccctgcgtgtgcttcaggccttccagcacgttgaggccaaccccgacgaggtctgccccgccaactggacgcctggtgagcgcaccatgaaccctgatccggtcggaagcaaggacttcttcgctgctgtcaactga

SEQ ID NO: 10842 - protein, 199 aa, Synechococcus sp. RCC307
MTTGVFRVGLQAPDFTATAVVDQEFKDISLSQYRGKYVVLFFYPLDFTFVCPTEITAFSDRYDAFKALNTEVLGVSVDSQFSHLAWIQTERKQGGLGDIAYPLVADLKKEIASAYNVLDEAEGVALRGLFIINPEGVVQHATVNNLPVGRNVEETLRVLQAFQHVEANPDEVCPANWTPGERTMNPDPVGSKDFFAAVN

SEQ ID NO: 10843 - DNA, 600 bp, Geobacter uraniireducens Rf4
  CDS (1)..(600): transl_table=11
atgagcatttgtactcttgttacccaggaagcccctgattttaccgctgaagcggctatgccggacaacagttttgccgagatcaagctctccaactaccgtggcaagtatgtggtcctgtttttctatccccttgatttcacctttgtctgcccgtccgagatccttgctttcaataagcgtctgggggatttcaaggcaaagaactgcgaggtgataggcgtttccgtcgactcgaaatttacccatctcgcctggaagaacacgccggtcgaaaacggcggcatcggcaatatccagtacccgctggtgcaggacctgaacaaggcgattgccaggtcctacggcattctctttaacgagtcggtggccctgcgcggcctgttcctcatcgacccccacggcaaggtgcgccacgcagtcatcaatgacctgccactcggacggagcgtcaacgaggcactgcgcatggttgatgcgctccagtttgtcgaaacccatggcggtgaagtctgtccggccaactggcaggaaggggaagaggcgatgaaagcctcgacggaaggtgtggcggcctacctggcaaagcacggcaagtaa

SEQ ID NO: 10844 - protein, 199 aa, Geobacter uraniireducens Rf4
MSICTLVTQEAPDFTAEAAMPDNSFAEIKLSNYRGKYVVLFFYPLDFTFVCPSEILAFNKRLGDFKAKNCEVIGVSVDSKFTHLAWKNTPVENGGIGNIQYPLVQDLNKAIARSYGILFNESVALRGLFLIDPHGKVRHAVINDLPLGRSVNEALRMVDALQFVETHGGEVCPANWQEGEEAMKASTEGVAAYLAKHGK

SEQ ID NO: 10845 - DNA, 672 bp, Geobacter uraniireducens Rf4
  CDS (1)..(672): transl_table=11
atgaaaaacaccaaaaccatgcttgcaacgctcactgcaggaatcattttcatcggcatcagctcaagcccggcgcagacaatggaaatgccgccaacaatgatgcacggtatcgaggaaatgatgatggggcagcaccaggcaaaagtaggacagttcgccccggacttcagcctggaggcggtggtcggcaccgaagcgggcaaggaattcagaaagatcagtctctccgactaccgcggcaagtggctggtgctcttcttctatccgctcgacttcacttttgtctgcccgacggaaatcaagggattcaacgatgcgctcgatgccttcaaaaaactggatgcagaagtgctgggtgcttcggtggacagcaagttttcccatttggcatggatcaagcgcggcgacctgggcaacctgaaatacccgctcctctccgattttaaaaaggaggtaagcgagcgttacggcattctcgacaataaggaaggggtggcgttgcgcggcctgttcatcatcgatccgcaaggagttttgcagtaccaggtggtgcataacctggatgtgggaagaagcgtcgaggaaaccctgcgggtgctggaagcactgcagaccggctccctctgcccgctcggctggaaaccggggcaaaagaccctggggaaatag

SEQ ID NO: 10846 - protein, 223 aa, Geobacter uraniireducens Rf4
MKNTKTMLATLTAGIIFIGISSSPAQTMEMPPTMMHGIEEMMMGQHQAKVGQFAPDFSLEAVVGTEAGKEFRKISLSDYRGKWLVLFFYPLDFTFVCPTEIKGFNDALDAFKKLDAEVLGASVDSKFSHLAWIKRGDLGNLKYPLLSDFKKEVSERYGILDNKEGVALRGLFIIDPQGVLQYQVVHNLDVGRSVEETLRVLEALQTGSLCPLGWKPGQKTLGK

SEQ ID NO: 10847 - DNA, 603 bp, Orientia tsutsugamushi str. Boryong
  CDS (1)..(603): transl_table=11
atggaaatttttgtaggtaagtcagcttgtgattttacagctccagcagttttgccaaagaacaatattaatgaaaaatttaacttaaaacatgaactggacggtagaaaggcagttttatttttttatcctttaaactttacttttgtttgtccaacggaaattattgcttttaataatagatatggtgagttcttaaaaagaaatactgaagtgattggaattagtgtagactcacatttttgccataaagcttggaaacttactccttataataagggaggaataggtgacatacaatttccattagtgtcagacataaataaagatatttccaagacgtataatgtgctcaaccaggctggagtagctgttcgagcaacatttattattgatcaagagtttgtactacgccatgtcactattaatgatttaagtataggacgaaatgttgaagaaagtttaagaataattgatgcaatagattttcataaaaagtacggtgatgtatgcccagctggttggactccaggaactgaaggaatagaagcaacatcagatggtatatgtcactacttaacatcaaatgctgagaagttgtaa

SEQ ID NO: 10848 - protein, 200 aa, Orientia tsutsugamushi str. Boryong
MEIFVGKSACDFTAPAVLPKNNINEKFNLKHELDGRKAVLFFYPLNFTFVCPTEIIAFNNRYGEFLKRNTEVIGISVDSHFCHKAWKLTPYNKGGIGDIQFPLVSDINKDISKTYNVLNQAGVAVRATFIIDQEFVLRHVTINDLSIGRNVEESLRIIDAIDFHKKYGDVCPAGWTPGTEGIEATSDGICHYLTSNAEKL

SEQ ID NO: 10849 - DNA, 633 bp, Parabacteroides distasonis ATCC 8503
  CDS (1)..(633): transl_table=11
atgaaagcattaataggtaaaaaggcaccggaattccacgctccggcagtagtgaatggcaatgagatcatcgaggatttctctttggaacaatatgtaggcaagaagtatgtagtcatgtttttctatccgatggactttacattcgtttgcccgacagaattacatgccttccaacaaaagttacaggaattcgaaagacgtaacgtagcggtggttggttgctccgttgattctcaattttctcatttcgcatggttaaaccaagataagaataaaggaggtatccatggggtgacttatccactcgtatccgatttttccaaaaccatctctgaaaactttggcgtattagccgctgattatattacaaacgaaagtggagaacttatctccagaggaaatccggtcgcttaccggggtctgttcctgattgacaaagagggcttgatccgtcattatgtaatcaacgatttaccattaggccgtaacgtagacgaggctctccgtatggtcgatgccttacagcacttcgaagaatatggcgaggtttgcccggcaaattggtccaaaggaaaagacgccatgaaagcgacaaacgcaggagtctctaattatttaagccatcattga

SEQ ID NO: 10850 - protein, 210 aa, Parabacteroides distasonis ATCC 8503
MKALIGKKAPEFHAPAVVNGNEIIEDFSLEQYVGKKYVVMFFYPMDFTFVCPTELHAFQQKLQEFERRNVAVVGCSVDSQFSHFAWLNQDKNKGGIHGVTYPLVSDFSKTISENFGVLAADYITNESGELISRGNPVAYRGLFLIDKEGLIRHYVINDLPLGRNVDEALRMVDALQHFEEYGEVCPANWSKGKDAMKATNAGVSNYLSHH

SEQ ID NO: 10851 - DNA, 600 bp, Nitratiruptor sp. SB155-2
  CDS (1)..(600): transl_table=11
atgctcgttactaaaaaagcacctgactttacggcaccagcagttatgccggacaatacaatcaatgaaaacttcaatctctatgagaacattggagaaaaaggagcggtactctttttctatccactcgattttactttcgtatgtccaagcgaaatcatcgccttcgatcacagacttgatgaattcaaaaaaagaggcatcaatgtcatcggatgttctgtagacagccactatacacacctcgcatggaaaaatacgcctgtagaaaaaggtggtatcggaaatattcggtacccactcgtagcggatcttacaaagcagatcgcaaaagattacgatgttttgcttgaagaggctggagttgctcttcgaggaagttttctaatcgataaagatggaacaatccgacactgtgttatcaatgaccttcctctaggaagaaacatcgatgagatgattcgaatggtggatgctatggagtttgcaaatgaacacggtgaagtgtgcccagctgagtgggaaaaaggaaaagaggctatgaaacctacaccagaaggtgttgcagagtatcttgcaaaacacgcagacgaactttaa

SEQ ID NO: 10852 - protein, 199 aa, Nitratiruptor sp. SB155-2
MLVTKKAPDFTAPAVMPDNTINENFNLYENIGEKGAVLFFYPLDFTFVCPSEIIAFDHRLDEFKKRGINVIGCSVDSHYTHLAWKNTPVEKGGIGNIRYPLVADLTKQIAKDYDVLLEEAGVALRGSFLIDKDGTIRHCVINDLPLGRNIDEMIRMVDAMEFANEHGEVCPAEWEKGKEAMKPTPEGVAEYLAKHADEL

SEQ ID NO: 10853 - DNA, 597 bp, Sulfurovum sp. NBC37-1
  CDS (1)..(597): transl_table=11
atgttagtaacaaaaaaagctcctgactttacagctacagcggtactcgctgacggatcgatcgtagacgatttcaaccttatggacaacctgggtgaaaaaggtgcggttcttttcttctatccgcttgattttacctttgtatgtccttcagagatcatcgcgttctcacacagagcggaagagttcaagaaacgagggatcaacatcatcggtgtttcagtagacagccagttctcgcactttgcatggagagaaactccggtagagcagggtggtatcggccgtatcaacttcccgttggtcgctgaccttaccaagcagatctcaagagactatgacgtgcttcttgacgaagcggtagcacttagaggttctttccttatcgatgctgacggaacgatcagacacgcggtcatcaacgatcttcctcttggaagaaatgaagatgagatgcttagaatggtagacgcgatgctctttaccaacgagcatggtgaagtttgtcctgcaggttggcagccgggtgacgaaggtatgaaggcagacgctgaaggtgttgctgcttaccttgaaaagcacgctgacgaactgtaa

SEQ ID NO: 10854 - protein, 198 aa, Sulfurovum sp. NBC37-1
MLVTKKAPDFTATAVLADGSIVDDFNLMDNLGEKGAVLFFYPLDFTFVCPSEIIAFSHRAEEFKKRGINIIGVSVDSQFSHFAWRETPVEQGGIGRINFPLVADLTKQISRDYDVLLDEAVALRGSFLIDADGTIRHAVINDLPLGRNEDEMLRMVDAMLFTNEHGEVCPAGWQPGDEGMKADAEGVAAYLEKHADEL

SEQ ID NO: 10855 - DNA, 585 bp, Prochlorococcus marinus str. MIT 9215
  CDS (1)..(585): transl_table=11
atgagtttaagagttggccaagaagcaccagactttagtgctacagcagtatatgatcaagagtttaaggagattacactttcaggtctaagaggtaaatgggttgttttattcttttacccactagattttacatttgtatgtccgactgaaatcactgcatttagcgatagatataatgatttttcagcacttaatactgaaatacttggggtatcagttgatagtaaacactgtcatttggcttggatacaaactccaagaaatgaaggtggaataggtgatataaactacccgttagtttctgacttaaaaagagaaatttgccaggcgtacaatgttcttaatgatgatggagaagcagatagaggtttatttcttatcaatccccaaggagttgttatgcatatgactgttaataaggctcctgtaggcagaaatgttgatgaaacactaaggattcttcaaggttatcaatacgttgcggcaaatccagatgaagtatgtccagcaaactggacccctggggagaaaacaatgctggaagaccccaaaggtagtaaggaatatttttctgcactttaa

SEQ ID NO: 10856 - protein, 194 aa, Prochlorococcus marinus str. MIT 9215
MSLRVGQEAPDFSATAVYDQEFKEITLSGLRGKWVVLFFYPLDFTFVCPTEITAFSDRYNDFSALNTEILGVSVDSKHCHLAWIQTPRNEGGIGDINYPLVSDLKREICQAYNVLNDDGEADRGLFLINPQGVVMHMTVNKAPVGRNVDETLRILQGYQYVAANPDEVCPANWTPGEKTMLEDPKGSKEYFSAL

SEQ ID NO: 10857 - DNA, 543 bp, Bacillus pumilus SAFR-032
  CDS (1)..(543): transl_table=11
atggcagagcgttttgtaggaaaacaagctccacgttttgaaatggaagcagtacttgctaacaaggaatttggtaaagtaagtctagaagaaaacatgaagaatgacaaatggacagttcttttcttctatccaatggatttcacatttgtttgtccaactgaaattacagcaatgagcgatcgttatgatgagttcgaagatttagatgctgaaattattggtgtatctactgatacaatccatacgcatcttgcttggatcaacacagaccgtaaagacaatggtttaggtgaattgaaatatccgctagctgctgatacaaaccacacagtatctagagaatacggcgttttaattgaagaagaaggaattgcacttcgcggtctattcattatcaacccagaaggcgaacttcaatatcaaacagtattccacaacaatatcggtcgtgatgtagatgagacattacgtgttcttcaagcattacaaactggtggactttgcccagcgaactggaagcctggtcaaaaaacactttaa

SEQ ID NO: 10858 - protein, 180 aa, Bacillus pumilus SAFR-032
MAERFVGKQAPRFEMEAVLANKEFGKVSLEENMKNDKWTVLFFYPMDFTFVCPTEITAMSDRYDEFEDLDAEIIGVSTDTIHTHLAWINTDRKDNGLGELKYPLAADTNHTVSREYGVLIEEEGIALRGLFIINPEGELQYQTVFHNNIGRDVDETLRVLQALQTGGLCPANWKPGQKTL

SEQ ID NO: 10859 - DNA, 600 bp, Prochlorococcus marinus str. MIT 9211
  CDS (1)..(600): transl_table=11
atgatgacgaacgaatgtatccgtgttggccagaaagctcctgattttactgctactgcagtgatagaccaggaattcaaggaaatatcactttcaaattacagaggtaaatatgttgtgcttttcttttaccctctagattttacttttgtatgtccaactgaaattaccgcttttagcgatagatactccgaattttcaagtaagaacactgaggtcttaggggtatctgtagacagtcaatttagccaccttgcctggattcaaactcaaagaaatgatggaggcattggcgatatcaattatcccttggttgccgatttaaagaaagagatttcattggcttataacgttctcgacgatgcagagggtgttgctttaagaggtctttatatcatcgatccagatggtgtgatcatgcacgctactattaacaacctacctgtaggaagaaatgttgatgagaccttgagagttcttcaagcatttcaatatgttcaagccaacccagacgaggtatgtcctgccaattggactccaggggaaaagacaatgaagccagatccagaagggagcaaggagtatttctcaagtctataa

SEQ ID NO: 10860 - protein, 199 aa, Prochlorococcus marinus str. MIT 9211
MMTNECIRVGQKAPDFTATAVIDQEFKEISLSNYRGKYVVLFFYPLDFTFVCPTEITAFSDRYSEFSSKNTEVLGVSVDSQFSHLAWIQTQRNDGGIGDINYPLVADLKKEISLAYNVLDDAEGVALRGLYIIDPDGVIMHATINNLPVGRNVDETLRVLQAFQYVQANPDEVCPANWTPGEKTMKPDPEGSKEYFSSL

SEQ ID NO: 10861 - DNA, 600 bp, Microcystis aeruginosa NIES-843
  CDS (1)..(600): transl_table=11
atgaccgccgaaggttgcttaagagtcggacaaccggcgccggatttcaccgcgaccgccgttttcgatcaagagttcaaaaccatcaaattatcggattatcggggtaaatacgtcgttttattcttctatcccctcgattttacctttgtttgccccacggaaattaccgctttcagcgatcgagttagcgaatttagcagtatcaacaccgagattttaggggtgtccgtcgatagcgaatttgctcacctcgcatggattcaaaccgagagaaaatcgggcggtgtcggtgatgtggcctatccgttggtgtcggatctgaaaaaagaaatcagcaccgcttacaatgttcttgatcctgatgcgggggtatccctgcgtggtctctttatcatcgataaagaaggtgttatccaacacgctactattaataatctttccttcggtcgcagtgtcgatgaaaccctccgcactctgaaagcgattcaatacgtccaatcccatccggatgaagtttgtcccgccggttggcaagaaggcgatgctaccatggttcccgatcctgtgaagtcaaaagtttacttcgcagcagtttag

SEQ ID NO: 10862 - protein, 199 aa, Microcystis aeruginosa NIES-843
MTAEGCLRVGQPAPDFTATAVFDQEFKTIKLSDYRGKYVVLFFYPLDFTFVCPTEITAFSDRVSEFSSINTEILGVSVDSEFAHLAWIQTERKSGGVGDVAYPLVSDLKKEISTAYNVLDPDAGVSLRGLFIIDKEGVIQHATINNLSFGRSVDETLRTLKAIQYVQSHPDEVCPAGWQEGDATMVPDPVKSKVYFAAV

SEQ ID NO: 10863 - DNA, 543 bp, Lysinibacillus sphaericus C3-41
  CDS (1)..(543): transl_table=11
atggcagaacgcatggtaggtaaacaagcacctgactttacaatggaagcagtactttcagacaaatcatttggtaaagtatcattagaagatattaaagcacaagataaatggacagtacttttcttctatccaatggacttcacatttgtatgtccaacagaaatcactgcaatgagtgatcgttatgacgagttcgaagacttagatgcagaagtaattggtgtttctactgatacaatccacactcacttagcatggattaatacagaccgtactcaaaatggtctaggtgaattaaaatacccattagctgcggatacaaaccatcaagtatcaaaagagtatggtgtgttaattgaagaagaaggtatcgcgctacgtggtttattcatcattaatccagaaggtgaattaaaataccaaacagtattcgataataatatcggccgtgatgttgatgaaacattacgtgtacttcaagcactacaaactggcggtctttgcccagcaaactggcgtccaggtcaagcaactctataa

SEQ ID NO: 10864 - protein, 180 aa, Lysinibacillus sphaericus C3-41
MAERMVGKQAPDFTMEAVLSDKSFGKVSLEDIKAQDKWTVLFFYPMDFTFVCPTEITAMSDRYDEFEDLDAEVIGVSTDTIHTHLAWINTDRTQNGLGELKYPLAADTNHQVSKEYGVLIEEEGIALRGLFIINPEGELKYQTVFDNNIGRDVDETLRVLQALQTGGLCPANWRPGQATL

SEQ ID NO: 10865 - DNA, 588 bp, Synechococcus sp. PCC 7002
  CDS (1)..(588): transl_table=11
atggccgcacaagtgggacaattggcaccggactttaccgctaccgccgtcattgatcaagagttcaaaaccattaagttgtccgactatcgggggcaatatgtggtgttgtttttctacccgctcgatttcacttttgtctgtccaacagaagtaggagcctttagcgatcgccacggggaatttcaaaaactcaatacggaagtattgggcgtttccgtagatagtgaatttgcgcacctcgcctggatccaaacagaccgcaaaatgggtggcgtgggcgatttagcctttcccctggtgtctgatttaaacaaaaccattagcacggcctacggcgtcctcgaaccggaagcggggatctccctgcggggactttttatcatcgacccggaaggaatgatccaacacatcaccgtgaataatttttcctttggccgcagccttgacgaaaccctgcgggtgctccaagcgattcagcacgtccagactaatcacaatgaagtttgtcccgtcgattggcaagtgggcgatcgcaccatggtgccaaacccaagcgaagcccaggcttatttctcgaccctctag

SEQ ID NO: 10866 - protein, 195 aa, Synechococcus sp. PCC 7002
MAAQVGQLAPDFTATAVIDQEFKTIKLSDYRGQYVVLFFYPLDFTFVCPTEVGAFSDRHGEFQKLNTEVLGVSVDSEFAHLAWIQTDRKMGGVGDLAFPLVSDLNKTISTAYGVLEPEAGISLRGLFIIDPEGMIQHITVNNFSFGRSLDETLRVLQAIQHVQTNHNEVCPVDWQVGDRTMVPNPSEAQAYFSTL

SEQ ID NO: 10867 - DNA, 600 bp, Cyanothece sp. ATCC 51142
  CDS (1)..(600): transl_table=11
atgaccatcgaaggatgcttgcgagttgggcaagttgcacctgattttacggcaacagtcgttattgatcaagaatttcagactaaaaagctttctagctatcgtggcaagtatgttgtcctctttttctatcccttggattttacctttgtttgtcccacggaagtcattgcgtttagcgatcgctacgaagaatttgcgaagattaacacggaaattttagcggtttcggttgatagtgaattttctcacctggcctggattcaaacccctcgcaccgaagggggtgtgggagacattgcctatccgttagtctctgacctcaaaaaagaaattagtaccgcttataatatactcgatccggagtctggggtagcgttacggggtctatttattattgataaagaaggggttattcaacacgcaactatcaataatctttcctttgggcgtagtgttaccgaaaccctacgcaccctcaaagccatacagcacgttcaaaccaatcctgaagaggtttgtccagctgattggcaagaaggggataaaaccatgattcctgaccccattaaatctaagatttatttctcggccgtctag

SEQ ID NO: 10868 - protein, 199 aa, Cyanothece sp. ATCC 51142
MTIEGCLRVGQVAPDFTATVVIDQEFQTKKLSSYRGKYVVLFFYPLDFTFVCPTEVIAFSDRYEEFAKINTEILAVSVDSEFSHLAWIQTPRTEGGVGDIAYPLVSDLKKEISTAYNILDPESGVALRGLFIIDKEGVIQHATINNLSFGRSVTETLRTLKAIQHVQTNPEEVCPADWQEGDKTMIPDPIKSKIYFSAV

SEQ ID NO: 10869 - DNA, 594 bp, Leptospira biflexa serovar Patoc strain 'Patoc 1 (Paris)'
  CDS (1)..(594): transl_table=11
atgccacaagtgacatcacatgcccctgattttaaagcaaccgcagtgatcggggacagtttcaaagaaatcaaattatctgattacaagggaaaatgggtggtactctttttctatccacttgattttacatttgtatgtccaacagagatcattgaatacgatgcaaaactagaagattttaaaaagatcggagctgaagttttgggtgtatctgttgatagcgaattttcacacttagcttggaaaaaaacgcctaaaaaagaaggtggtattggagagatcaaatacccactcatcgcagacaaaacaaaagaaattgcaaagtcttttggtgttctcattgagtcaggtcctgatgcaggagttgctttacgcggaactttcatcatcgacccacaaggtatcatccgccaagcaactgttaacgaccttccagtaggacgtaacattgaagaagcactcagactcatcaaggctttccaattcgtggaaaaacatggtgaagtttgtcctgcaaactgggatgaagggaaaaaaacgatgaaagcagatcctacagggtccaaagcttacttcgcttctgtaaattaa

SEQ ID NO: 10870 - protein, 197 aa, Leptospira biflexa serovar Patoc strain 'Patoc 1 (Paris)'
MPQVTSHAPDFKATAVIGDSFKEIKLSDYKGKWVVLFFYPLDFTFVCPTEIIEYDAKLEDFKKIGAEVLGVSVDSEFSHLAWKKTPKKEGGIGEIKYPLIADKTKEIAKSFGVLIESGPDAGVALRGTFIIDPQGIIRQATVNDLPVGRNIEEALRLIKAFQFVEKHGEVCPANWDEGKKTMKADPTGSKAYFASVN

SEQ ID NO: 10871 - DNA, 612 bp, Nostoc punctiforme PCC 73102
  CDS (1)..(612): transl_table=11
atgtcccttacttacggaaccgaaggaagcctccgcgttggccaacaagctcccgatttcacagcaacggctgtggtagatcaggaatttaagacaattaaactttccgattatcgcggtaagtatgtcgtcctgtttttctacccactagactttacctttgtttgtcctactgaaatcacagcatttagcgatcgctacgaagaattcaagaaaatcaatactgaagtccttggggcttccgttgacagtgaattctcccacctcgcttggattcaaacagatcgtaagtctggtggtgtcggcgacctgaattatcctctagtctcagacattaagaaagagattagcgccgcttacaacgttcttgacccagcagccggcattgccttgcgtggtctgttcctcatcgataaagatggtatcatacagcacgctaccatcaacaacctagcttttggtcgcagcgttgacgaaaccctgcggacattacaagcaattcagtatgttcaatctcaccccgatgaagtttgcccagctggttggcaacctggtgacaagacaatgaatcctgacccagtgaagtctaaagtttacttctctgctgtctaa

SEQ ID NO: 10872 - protein, 203 aa, Nostoc punctiforme PCC 73102
MSLTYGTEGSLRVGQQAPDFTATAVVDQEFKTIKLSDYRGKYVVLFFYPLDFTFVCPTEITAFSDRYEEFKKINTEVLGASVDSEFSHLAWIQTDRKSGGVGDLNYPLVSDIKKEISAAYNVLDPAAGIALRGLFLIDKDGIIQHATINNLAFGRSVDETLRTLQAIQYVQSHPDEVCPAGWQPGDKTMNPDPVKSKVYFSAV

SEQ ID NO: 10873 - DNA, 603 bp, Orientia tsutsugamushi str. Ikeda
  CDS (1)..(603): transl_table=11
atggaaatttttgtaggtaagtcagcttgtgattttacagctccagcagttttgccaaagaacaatattaatgaaaaatttaacttaaaacatgaactggacggtagaaaggcagttttatttttttatcctttaaactttacttttgtttgtccaacggaaattattgcttttaataatagatatggtgagttcttaaaaagaaataccgaagtgattggaattagtgtagactcacatttttgccataaggcttggaaacttactccttataataagggaggaataggtgacatacaatttccattagtgtcagacataaataaagatatttccaagacgtataatgtgctcaaccaggatggagtagctgttcgagcaacatttattattgatcaagagtttgtactacgccatgttactattaatgatttaagtataggacgaaatgttgaagaaagtttaagaataattgatgcaatagattttcataaaaagtacggtgatgtatgcccagctggttggactccaggaactgaaggaatggaagcaacatcagatggtgtatgtcactacttaacatcaaatgctgagaagttgtaa

SEQ ID NO: 10874 - protein, 200 aa, Orientia tsutsugamushi str. Ikeda
MEIFVGKSACDFTAPAVLPKNNINEKFNLKHELDGRKAVLFFYPLNFTFVCPTEIIAFNNRYGEFLKRNTEVIGISVDSHFCHKAWKLTPYNKGGIGDIQFPLVSDINKDISKTYNVLNQDGVAVRATFIIDQEFVLRHVTINDLSIGRNVEESLRIIDAIDFHKKYGDVCPAGWTPGTEGMEATSDGVCHYLTSNAEKL

SEQ ID NO: 10875 - DNA, 588 bp, Chlorobium limicola DSM 245
  CDS (1)..(588): transl_table=11
atgggtgtattggtagggcgcaaggcgccggagttcaatgttgaggctgtaacaggggggtctcagtttgtcgattcctgtaaattgacggattaccgcgggaagtatgttgtgctgtttttttatcctcttgattttaccttcgtttgcccgacagagcttcatgcatttcaggagaagctcgacgagtttgcaaaacgaaatgtggaggtgataggctgttccgtcgattcaaagttttcacatcacgcatggctgcgtacaccgaaaaatcttggaggtatcgaaggggtaacatataccctgctttcggatataaataaaacagtttcgagggattacgatgtgttggccgaagatgccggagtatcgctgagaggattgtttcttatcgataaagagggagtggtacgccatcaggtggtaaacgatctcgggcttggcagaaatgtggatgaggttctcagaatggttgacgcccttcagtttaccgaggagttcggtgaggtctgcccggccaactggaataaaggcgacaaaaccatgaagcccgatgatgcagggctgaaagcttttttcagcgaataa

SEQ ID NO: 10876 - protein, 195 aa, Chlorobium limicola DSM 245
MGVLVGRKAPEFNVEAVTGGSQFVDSCKLTDYRGKYVVLFFYPLDFTFVCPTELHAFQEKLDEFAKRNVEVIGCSVDSKFSHHAWLRTPKNLGGIEGVTYTLLSDINKTVSRDYDVLAEDAGVSLRGLFLIDKEGVVRHQVVNDLGLGRNVDEVLRMVDALQFTEEFGEVCPANWNKGDKTMKPDDAGLKAFFSE

SEQ ID NO: 10877 - DNA, 591 bp, Chlorobium phaeobacteroides BS1
  CDS (1)..(591): transl_table=11
atgggcgtattagttggccgggaggcaccggaatttgatcttgaggcagttgcggaaggcgcaaaatttgtggattcatgtaaactgtcggatttccgaggtaagtatgtggtgctgtttttttatccacttgactttacgtttgtctgtccgacagagttgcatgcttttcaggacaggctggaagagttcaggcataaaaatgttgaggttctcgcatgttctgtggattcaaagttttctcatctcgcctggttgaagacaccgcggaaacagggtggcatagaaggtgtgacctatacactgctttcggatatcaacaaggttgcttcaaaggcttatgatgttctggcagaaaaagaaggcgtgtcctacagggggctttttctgatagacaaggatggcattgtccgttatcaggttgtaaatgacctggggcttggacgtaatgtggatgaggtgctgaggatggttgaagcgctgcagtttaccgaacagtttggtgaagtctgtcctgcgaactggaacaaaggtgacaaaagcatgaaaccgacaaacgaaggcctcgaggaatatttcgggtcagagtaa

SEQ ID NO: 10878 - protein, 196 aa, Chlorobium phaeobacteroides BS1
MGVLVGREAPEFDLEAVAEGAKFVDSCKLSDFRGKYVVLFFYPLDFTFVCPTELHAFQDRLEEFRHKNVEVLACSVDSKFSHLAWLKTPRKQGGIEGVTYTLLSDINKVASKAYDVLAEKEGVSYRGLFLIDKDGIVRYQVVNDLGLGRNVDEVLRMVEALQFTEQFGEVCPANWNKGDKSMKPTNEGLEEYFGSE

SEQ ID NO: 10879 - DNA, 588 bp, Chlorobaculum parvum NCIB 8327
  CDS (1)..(588): transl_table=11
atgagtgtacttgtaggccgtccggcacccgatttcaacgcagaagccgttgtcaatggttcgaccttcgtggattcctgccagctttcggcatatcgcggcaagtatgtcgtgctgtttttctatccgctcgacttcacttttgtgtgcccgaccgagctccacgcttttgaagagaagctcgaggagttcaaaaagcgcaacgtcgaggtgcttggctgttcggtggactccaagttttcgcacttcgcctggctcaatactccgcgcaacaagggtggcattcagggcgtgacctatccgctgatctccgatatcaacaagaccatcgcgaaagattacgatgtgttgactgctgacggcagtgtggcgctgaggggtctgttcctgatcgacaaggagggcatcgttcgccaccaggtggttaacgatcttggcctcggcaggaatatcgatgaggtgatccggatcgtcgatgcgcttcagttcaccgaagagttcggtgaggtctgcccggccaactggaacaagggcgacaaaaccatgaagccgaccgacgaaggtctgaaagagtacttcgccgagtga

SEQ ID NO: 10880 - protein, 195 aa, Chlorobaculum parvum NCIB 8327
MSVLVGRPAPDFNAEAVVNGSTFVDSCQLSAYRGKYVVLFFYPLDFTFVCPTELHAFEEKLEEFKKRNVEVLGCSVDSKFSHFAWLNTPRNKGGIQGVTYPLISDINKTIAKDYDVLTADGSVALRGLFLIDKEGIVRHQVVNDLGLGRNIDEVIRIVDALQFTEEFGEVCPANWNKGDKTMKPTDEGLKEYFAE

SEQ ID NO: 10881 - DNA, 591 bp, Prosthecochloris aestuarii DSM 271
  CDS (1)..(591): transl_table=11
atgggcgttctggttggtcgcgaagcacctgattttagtctcgatgccgtcgtggatggcggaaaaatggtcgattcgtgcaagttgtcggattacaggggcaaatatgttgttctgtttttctatcctcttgattttacttttgtctgtccaacggagcttcacgcctttcaggacaggattgatgagtttcggcataaaaatgttgaggtgatggcctgttcggtggactcgaagttttctcaccacgcctggttgaatactccgcgcagtcaggggggaattcagggtgtgacctatacgctgctctccgatatcaacaaggaagctgcgaaggcttatgatgttcttgctgaagcagagggggtttcatatagaggacttttcctgatcgatcgtgaaggtattgttcgttaccaggttgtcaacgatctcggtcttggtcgaaatgtcgatgaggtgctccggatggtcgaagcgctgcagtttacagaagagttcggtgaggtatgcccggctaactggcataaaggcgccaggaccatgaagccgacagatgaaggactcaaagagtatttcaagtcagaatag

SEQ ID NO: 10882 - protein, 196 aa, Prosthecochloris aestuarii DSM 271
MGVLVGREAPDFSLDAVVDGGKMVDSCKLSDYRGKYVVLFFYPLDFTFVCPTELHAFQDRIDEFRHKNVEVMACSVDSKFSHHAWLNTPRSQGGIQGVTYTLLSDINKEAAKAYDVLAEAEGVSYRGLFLIDREGIVRYQVVNDLGLGRNVDEVLRMVEALQFTEEFGEVCPANWHKGARTMKPTDEGLKEYFKSE

SEQ ID NO: 10883 - DNA, 591 bp, Pelodictyon phaeoclathratiforme BU-1
  CDS (1)..(591): transl_table=11
atgagtgtgctcgttggccgcaaggctcctgattttgatgttgcagccgttgtcaatggttcgcagtttgttgattcgtgcaagctttctgattacaagggcaagtatgtggtgctcttcttttatccacttgattttacctttgtctgtccgacagagctgcacgcctttcaggagaagcttcaggagttccgtgacaggaatgttgagctgatcggctgttcggttgattccaagttttctcattatgcatggattcgtaccccgagaagtcagggtggtatcgagggagtgacctatacgctgctttctgatctgaacaaaacggtttcagccgattatgatgtgctgcttgaaggcgcgggaattgcgcttaggggccttttcctgatcgacaaggagggtgttgtacagcaccaggtggtcaacaatcttcctcttggacgcaatgtggatgaagtgctcaggcttgttgatgcgcttcagtttaccgaagagttcggtgaggtctgtccggccaactggaataaaggtgataaatcgatgaaaccagacgaagagggattgaaggaatttttcaaagagacctga

SEQ ID NO: 10884 - protein, 196 aa, Pelodictyon phaeoclathratiforme BU-1
MSVLVGRKAPDFDVAAVVNGSQFVDSCKLSDYKGKYVVLFFYPLDFTFVCPTELHAFQEKLQEFRDRNVELIGCSVDSKFSHYAWIRTPRSQGGIEGVTYTLLSDLNKTVSADYDVLLEGAGIALRGLFLIDKEGVVQHQVVNNLPLGRNVDEVLRLVDALQFTEEFGEVCPANWNKGDKSMKPDEEGLKEFFKET

SEQ ID NO: 10885 - DNA, 603 bp, Geobacter bemidjiensis Bem
  CDS (1)..(603): transl_table=11
atgagtcttacaaccttggttactaaggaagcccccgattttacagcgcaggctgtgctgcctgacaactcgttcgccgaactcactctgtcgaaataccgtggcaagtacgtcgtgctctttttctacccgctcgatttcaccttcgtctgcccctccgagatcctcgctttcgacaagcgggtggaggatttcaaggcgaagaattgcgaggtgatcggcgtatcggtcgattccaggttcacccacctcgcttggaagaacacctcggtggaaaacggcggcatcggcaacgtccagtatccgctggtcgaggacctggacaagtcgatcgcgaggtcctacgggatcctgctaaacgaatcggtcgccctgcgcgggctgttcctgatcgacaccaaaggggtgatccgccactccgtcattaacgacctccccttgggcagaagcgtcggggaggcgctcaggatgctggatgcgctgcagttcgtggaaacccacggcggcgaggtctgcccggcaaactggcaggaaggcgaggagtcgatgaaggcttccaccgagggtgttgccgagtatctcaagaagaagcacggcaagtaa

SEQ ID NO: 10886 - protein, 200 aa, Geobacter bemidjiensis Bem
MSLTTLVTKEAPDFTAQAVLPDNSFAELTLSKYRGKYVVLFFYPLDFTFVCPSEILAFDKRVEDFKAKNCEVIGVSVDSRFTHLAWKNTSVENGGIGNVQYPLVEDLDKSIARSYGILLNESVALRGLFLIDTKGVIRHSVINDLPLGRSVGEALRMLDALQFVETHGGEVCPANWQEGEESMKASTEGVAEYLKKKHGK

SEQ ID NO: 10887 - DNA, 633 bp, Geobacter bemidjiensis Bem
  CDS (1)..(633): transl_table=11
atgagattaaccagtttcacactgttggcggcactagctatctcaatcgccacgaccccttttcccttggctgcggcggaattgcagtcgcaacaggtggcgaaggtcggggaacccgctcccgatttcaccctggatgcctgggtagggaccgcccccggtaaggaattcaagcagataaacctgaaagagctgcgcggcaagtgggtcgtgctcttcttttatcccatggacttcaccttcgtctgtcccaccgagatcaaggggttcaacgacgcactggcgcagttcgagaagctggacgccgtggtcctgggcgcctccaccgacagcaagttctcgcacctggcctgggtgaagcgcggcgacctgggggccgtaggttatccgctcctttcggacatcaagaaggaggccgcgcggaagtacggctgcctggacgagaaggacggcgttgcgctgcgtgcgctttacatcatcgacccgcagggagtgctgcagtaccaggtggtgcacaacctcgatgtgggaaggagcgtggatgagacgctgcgcgtgctggaagcgttgcagaccggctcgctctgcccgctcggctggaaaccaggccagaaaacccttggaaaaccttga

SEQ ID NO: 10888 - protein, 210 aa, Geobacter bemidjiensis Bem
MRLTSFTLLAALAISIATTPFPLAAAELQSQQVAKVGEPAPDFTLDAWVGTAPGKEFKQINLKELRGKWVVLFFYPMDFTFVCPTEIKGFNDALAQFEKLDAVVLGASTDSKFSHLAWVKRGDLGAVGYPLLSDIKKEAARKYGCLDEKDGVALRALYIIDPQGVLQYQVVHNLDVGRSVDETLRVLEALQTGSLCPLGWKPGQKTLGKP

SEQ ID NO: 10889 - DNA, 597 bp, Geobacter sp. FRC-32
  CDS (1)..(597): transl_table=11
atgagcgtttgcactttagttacacaggaagccccggattttaccgctgaggcggttatgccggacaacacctttgccgagataaaattgtcggcgttccgcggcaagtatgtcattcttttcttctatcccctagacttcaccttcgtctgtccttctgaaattcttgccttcaacaaacggctgaccgatttcaaaggcaagaactgcgaggtcatcggcgtttctgtagactcaaaatttacccatctggcctggaaaaatacccctgtagagaacggaggcatcggcgccatccagtatcctcttgttcaggatctgaacaaatccattgcccgctcctacggcattttgtttgatgatgctgttgccctgcgtggcctgtttctcatcgatcccaacggcaaagtccgtcacgccgttatcaacgatctgccgctggggcgtagtgtaaatgaagctctgcgtatggtggatgccttgcagtttgtggaaacccatggcggcgaagtctgtccggccaactggcaggagggggatgattcgatgaaggcttcaagcgaaggcgtagccgcttatcttgccaaacacggctag

SEQ ID NO: 10890 - protein, 198 aa, Geobacter sp. FRC-32
MSVCTLVTQEAPDFTAEAVMPDNTFAEIKLSAFRGKYVILFFYPLDFTFVCPSEILAFNKRLTDFKGKNCEVIGVSVDSKFTHLAWKNTPVENGGIGAIQYPLVQDLNKSIARSYGILFDDAVALRGLFLIDPNGKVRHAVINDLPLGRSVNEALRMVDALQFVETHGGEVCPANWQEGDDSMKASSEGVAAYLAKHG

SEQ ID NO: 10891 - DNA, 597 bp, Campylobacterales bacterium GD 1
  CDS (1)..(597): transl_table=11
atgttagtaacaaacccagctccagattttacagcaactacagttttagcagatggctcaatcgatgagaacttcaaattatcagaaaactttggtgagaaaggtactgttcttttcttctatccattagactttacatttgtatgtccatcggaaataatcgctttctctcatagaatcgaagatttcaaaagccgtggtgtaaatgttatcggtgtatctgttgatagccaattttcacactttgcttggagagaaactccagttaacaatggtggtatcggtagaattaaatatcctctagtagctgaccttacaaaacaaatctctaaagattacgatgtacttttcggtgaagcagtagcacttcgtggttcattcctaattgatggtaaaggtattgtacgtcacgcagtaatcaatgacttaccacttggtcgtaacattgatgagatgattcgtatggtagatgcaatgcaatttactgatgagcatggtgaagtatgtgctgctggttggcaaaaaggtgacgaagggatgaaagcatctactgaaggtgttgctgagtatcttgctaagcacgaagacgatctataa

SEQ ID NO: 10892 - protein, 198 aa, Campylobacterales bacterium GD 1
MLVTNPAPDFTATTVLADGSIDENFKLSENFGEKGTVLFFYPLDFTFVCPSEIIAFSHRIEDFKSRGVNVIGVSVDSQFSHFAWRETPVNNGGIGRIKYPLVADLTKQISKDYDVLFGEAVALRGSFLIDGKGIVRHAVINDLPLGRNIDEMIRMVDAMQFTDEHGEVCAAGWQKGDEGMKASTEGVAEYLAKHEDDL

SEQ ID NO: 10893 - DNA, 591 bp, Cyanobium sp. PCC 7001
  CDS (1)..(591): transl_table=11
atgtcccggctcgtcggcctgcccgctcccgatttcacggccaccgctgtggtggatcaggaattccagacggtttccctttctcagtaccgcggcaagtacgtggtgctgttcttctatccgctcgatttcaccttcgtgtgccccacggagatcacggctttctccgaccgctacggcgatttcaccagcaagaacaccgaggtgctgggtgtgtcggtggacagtgagttcagccacctggcctgggtccagaccgaccgcaagaacggtggtctgggtgcctgcaactatccgctgatcgctgacctcaagaaagagatcgcccgcgcctacaacgtgctcgacgaggaagccggcgtggccctgcggggtctgttcatcatcgatcccgacggggtgatcatgcacagcacgatcaacaacctgcccgtcggccgcagtgtggacgaaaccctgcgggtcctgcaggccttccagtacgtgcagtcccaccccgacgaggtctgcccggccaactggcagcccggtgacaagaccatgaatcccgaccccgtgaaatcgaaggacttcttcgctgcggtcaactga

SEQ ID NO: 10894 - protein, 196 aa, Cyanobium sp. PCC 7001
MSRLVGLPAPDFTATAVVDQEFQTVSLSQYRGKYVVLFFYPLDFTFVCPTEITAFSDRYGDFTSKNTEVLGVSVDSEFSHLAWVQTDRKNGGLGACNYPLIADLKKEIARAYNVLDEEAGVALRGLFIIDPDGVIMHSTINNLPVGRSVDETLRVLQAFQYVQSHPDEVCPANWQPGDKTMNPDPVKSKDFFAAVN

SEQ ID NO: 10895 - DNA, 540 bp, Symbiobacterium thermophilum IAM 14863
  CDS (1)..(540): transl_table=11
atgcgtctggttggtaagcctgctcctgacttcacgatgctgtccaccaaggacctggacaagctcgatcagaaggtcagcctctccgactacaagggcaagtggctgatcctgttcttctacccggcggacttcacgttcgtgtgccccactgagatcacggcgttcaacgaccgggtgcaggagttccaggatgccaactgcgagatcctcggcgtgtccgtcgactccgtgtactcgcaccgggcctggatcaagaccccgaaggaggagggcggcctcggccccgtcaactacccgctcgcctcggacatcaccaaggaggtctcccgggcctacggcgtgctgatcgaggaggagggcgtggcgctgcgcggcctcttcatcatcgaccccgacggcatcgtccgctaccaggtcgtgcacgacaacaacatcggccggaacgtggacgaggtgctccgggtcctggaggccctgcaggccggcggcctgtgcgcggccaactggaagcccggcgacgccctgctgaaggtgtag

SEQ ID NO: 10896 - protein, 179 aa, Symbiobacterium thermophilum IAM 14863
MRLVGKPAPDFTMLSTKDLDKLDQKVSLSDYKGKWLILFFYPADFTFVCPTEITAFNDRVQEFQDANCEILGVSVDSVYSHRAWIKTPKEEGGLGPVNYPLASDITKEVSRAYGVLIEEEGVALRGLFIIDPDGIVRYQVVHDNNIGRNVDEVLRVLEALQAGGLCAANWKPGDALLKV

SEQ ID NO: 10897 - DNA, 543 bp, Bacillus licheniformis ATCC 14580
  CDS (1)..(543): transl_table=11
atggcagaacgcatggtaggtaaacaagcgccgcgctttgaaatggaagcggttcttgcaaacaaagaattcggaaaagtaagccttgaagaaaacatgaaaaatgataagtggacggttctattcttctatccaatggacttcactttcgtgtgtccgacagaaattacagcaatgtctgaccgctatgacgagtttgaagaccttgatgcagaagttatcggcgtatcaactgacaccatccacactcacttggcatggattaacacggaccgcaaagataacggtctcggccagctgaaatatccgcttgctgccgacacaaaccatgaagtatctcgtgaatacggcgtactgattgaagaagaaggtgtagcgcttcgcggattgttcatcattaatccagaaggcgaacttcaatatcaaacagtgttccataacaatatcggccgtgatgtagacgaaacattgcgcgtgcttcaagcgctgcaaacaggcggtctttgccctgcaaactggaaaccgggacaagcaaccctttaa

SEQ ID NO: 10898 - protein, 180 aa, Bacillus licheniformis ATCC 14580
MAERMVGKQAPRFEMEAVLANKEFGKVSLEENMKNDKWTVLFFYPMDFTFVCPTEITAMSDRYDEFEDLDAEVIGVSTDTIHTHLAWINTDRKDNGLGQLKYPLAADTNHEVSREYGVLIEEEGVALRGLFIINPEGELQYQTVFHNNIGRDVDETLRVLQALQTGGLCPANWKPGQATL

SEQ ID NO: 10899 - DNA, 633 bp, Bacteroides fragilis YCH46
  CDS (1)..(633): transl_table=11
atgagatcattaattggaaaacaagcgccgaaattcgatgccacggctgtaatcaatgggcatgaaatcgttcagaacttttcgttggatcagtataaagggaaaaaatacgtagtattcttcttctacccgatggacttcacttttgtatgccccaccgaactgcacgcatttcaggaaaagctcgaagagtttgaaaaacgtgatgtcgctgtggtaggttgttcggtcgactctgaatattctcacttctcttggttgcagatgcccaagaacgaaggaggtatccagggcgtgaagtatcctattgtatccgacttttctaagtcaatctctgagagttatggagtgctggccggaagctatgcccccgatgaaaatggcaattgggtatgcgaagggacaccggtagctttccgtggtctgttcctgatcgacaaggagggcgtagtaagacattgcgtcatcaacgacttgccgctgggacgtaacgtggatgaagtattgcgcatggtagacgctttacaacattttgaagagtatggtgaggtttgtccggccaattggtcgaaaggcaaagacgccatgaaagctaccgaagacggagtagccaactatctgagtaagcattaa

SEQ ID NO: 10900 - protein, 210 aa, Bacteroides fragilis YCH46
MRSLIGKQAPKFDATAVINGHEIVQNFSLDQYKGKKYVVFFFYPMDFTFVCPTELHAFQEKLEEFEKRDVAVVGCSVDSEYSHFSWLQMPKNEGGIQGVKYPIVSDFSKSISESYGVLAGSYAPDENGNWVCEGTPVAFRGLFLIDKEGVVRHCVINDLPLGRNVDEVLRMVDALQHFEEYGEVCPANWSKGKDAMKATEDGVANYLSKH

SEQ ID NO: 10901 - DNA, 606 bp, Synechococcus elongatus PCC 6301
  CDS (1)..(606): transl_table=11
atgagactcatgaccgaaggagccctgcgcgtcggccaattggcccccgattttgaagcgactgcagtcgttgatcaggaattccagacgatcaagctatccaattaccggggcaaatacgtcgttctgttcttctatcccctcgacttcacctttgtttgcccgaccgaaattactgcttttagcgatcgctatgcagacttttcagccctgaacaccgaaatcttgggtgtctcggtcgatagccaattcagccacttggcttggattcaaaccagccgtaaagaaggtggtttgggtgacttggcttacccgctggttgctgacctcaagaaagaaatcagcactgcctacaacgtgcttgatccggctgaaggcattgccctgcgcggtctgttcatcatcgacaaagaaggtgtgatccagcacgccaccatcaacaacctggcgtttggccgcagcgttgatgaaaccctgcgggtgctgcaagccattcagtacgtccaaagtcaccccgatgaagtttgccccgccaattggcaaccgggtgcagcgacgatgaaccccgaccctgttaagtcgaaagagttcttcgctgcagtctag

SEQ ID NO: 10902 - protein, 201 aa, Synechococcus elongatus PCC 6301
MRLMTEGALRVGQLAPDFEATAVVDQEFQTIKLSNYRGKYVVLFFYPLDFTFVCPTEITAFSDRYADFSALNTEILGVSVDSQFSHLAWIQTSRKEGGLGDLAYPLVADLKKEISTAYNVLDPAEGIALRGLFIIDKEGVIQHATINNLAFGRSVDETLRVLQAIQYVQSHPDEVCPANWQPGAATMNPDPVKSKEFFAAV

SEQ ID NO: 10903 - DNA, 546 bp, Bacillus clausii KSM-K16
  CDS (1)..(546): transl_table=11
atgactgaaaaacgtatggttggcaaacaagcacctcgttttgaaatggacgcagtgttgccaaacaaagaatttggtaaagttagcttagaagaaaatatgaaaaatgacaaatggacagtgttgttcttttatccaatggatttcacgttcgtttgtccgactgaaattacggcgttgagcgaccgctacgacgaatttgaagacttggatgctgaagtaattggtgtttctacagacacgatccatacacacaaagcgtggattaatacgtcacgtgatgacaatggattaggcgacttggcttatccacttgctgctgacacaaaccatgccatttcaagagagtatggtgtgttaattgaagatgaaggtgtggcgctacgtgggttgttcatcattagcccagaaggtgaattgatgtattctgtagtgaaccacaacaacatcggccgtgacgttgatgaaacgttgcgtgtgctacaagcgttacaaactggcggactttgcccagcaaactggaagcctggacaagctacgctttaa

SEQ ID NO: 10904 - protein, 181 aa, Bacillus clausii KSM-K16
MTEKRMVGKQAPRFEMDAVLPNKEFGKVSLEENMKNDKWTVLFFYPMDFTFVCPTEITALSDRYDEFEDLDAEVIGVSTDTIHTHKAWINTSRDDNGLGDLAYPLAADTNHAISREYGVLIEDEGVALRGLFIISPEGELMYSVVNHNNIGRDVDETLRVLQALQTGGLCPANWKPGQATL

SEQ ID NO: 10905 - DNA, 597 bp, Prochlorococcus marinus str. NATL2A
  CDS (1)..(597): transl_table=11
atgacgacaaatgagtgcctaagggtaggaatgcaagcaccagattttgctacaacagcagtagtagatcaagaatttaaggacataacactttctcagtacagaggaaagtatgttgttctatttttctatccattagacttcacgtttgtttgccctactgaaatcacggccttcagcgacagatatagcgatttcagtagcaaaaacacagaagttttaggtgtttcggttgatagtaaatttacacatcttgcttggattcaaacaccaaggaatgagggaggaattggtgacattaactatccactagtatctgatttaaaacgtgaaatttgccaatcttataatgttttaaatgaggatggagaagctgatagaggtttgtttataattaatccaagcggaataattatgcactcaacaataaataaagcacctgttggccgaaatatagacgaaactctaagagtattacaggcatatcaatacgttgaatctcaccctgatgaagtatgtccagcaggatggactcctggtgacaaaaccatgaaagaagatcctaaaggaagcaaggaatacttctctgcattataa

SEQ ID NO: 10906 - protein, 198 aa, Prochlorococcus marinus str. NATL2A
MTTNECLRVGMQAPDFATTAVVDQEFKDITLSQYRGKYVVLFFYPLDFTFVCPTEITAFSDRYSDFSSKNTEVLGVSVDSKFTHLAWIQTPRNEGGIGDINYPLVSDLKREICQSYNVLNEDGEADRGLFIINPSGIIMHSTINKAPVGRNIDETLRVLQAYQYVESHPDEVCPAGWTPGDKTMKEDPKGSKEYFSAL

SEQ ID NO: 10907 - DNA, 600 bp, Nitrosococcus oceani ATCC 19707
  CDS (1)..(600): transl_table=11
atgagcgtactagttacacaagttgcccctgatttttctgctcctgccgtgatggctgatggtaccattaaagaaaatttccgtctttctgatgcgcgcggtcaatatgtcgtcctcttcttctatcctctggattttacttttgtttgcccttcggaaatcctggcccataacaaccgtttggaagactttaaagagcgcggtgtagaggtcattggtgtttctgtcgactcccagtatagccattatgcctggcgtaatacgccggtagtagatggtgggattggcgccattggattcccgctggtagccgatttaagccacgatattacccgcgcttatggggttgagcaccctgatggcgtagccctgcgcgcttcctttctaattgataaaaatggcgtggtccagcatcaggttgtcaataaccttccccttggccgtgacgtagaagaaatgctgcgcgtggtagatgctttacaatttacggaagagcatggcgaggtatgcccagcagggtggcgcaagggagaagaagctatccgtcctgatgccgagggggtggccgaatatttgagcaaacacgcaagcgccctatag

SEQ ID NO: 10908 - protein, 199 aa, Nitrosococcus oceani ATCC 19707
MSVLVTQVAPDFSAPAVMADGTIKENFRLSDARGQYVVLFFYPLDFTFVCPSEILAHNNRLEDFKERGVEVIGVSVDSQYSHYAWRNTPVVDGGIGAIGFPLVADLSHDITRAYGVEHPDGVALRASFLIDKNGVVQHQVVNNLPLGRDVEEMLRVVDALQFTEEHGEVCPAGWRKGEEAIRPDAEGVAEYLSKHASAL

SEQ ID NO: 10909 - DNA, 591 bp, Pelodictyon luteolum DSM 273
  CDS (1)..(591): transl_table=11
atgggtgttctagtcgggcgcaaagcgccggaattcaatgtagaggccgttgccggcggcagggagtttgtcgattcctgcaagctttcggatttcagcggcaagtatgtcatcctctttttctatccgcttgatttcaccttcgtctgcccgaccgaattgcatgcgttccaggagaaactcgatgagttcaaaaaacgcaacgtagaggttatcggctgttcggtagactccaagttctcgcatttcgcatggctgcagaccccgcgcaaccgcggcggcatcgagggcgtgacctatacgctcctctccgacctcaacaagacggtctctactgattacgacgtgcttgctgaaggagccggtgtgtccttgcgcggactgttcctgattgataaagcagggattgtgcgccatcaggtggtcaacgatctcgggctcggccgcaacgtggacgaggttctccgcatggtcgacgcgctccagttcaccgagcagttcggcgaagtgtgccccgccaactggaacaagggcgacaaggcgatgaagcctaccgatgaaggcttgaaggattttttcaaggacgagtaa

SEQ ID NO: 10910 - protein, 196 aa, Pelodictyon luteolum DSM 273
MGVLVGRKAPEFNVEAVAGGREFVDSCKLSDFSGKYVILFFYPLDFTFVCPTELHAFQEKLDEFKKRNVEVIGCSVDSKFSHFAWLQTPRNRGGIEGVTYTLLSDLNKTVSTDYDVLAEGAGVSLRGLFLIDKAGIVRHQVVNDLGLGRNVDEVLRMVDALQFTEQFGEVCPANWNKGDKAMKPTDEGLKDFFKDE

SEQ ID NO: 10911 - DNA, 612 bp, Synechococcus sp. CC9902
  CDS (1)..(612): transl_table=11
atgacgatcatgaccgataacggttgcctgcgcgtgggccaaaaggcccctgatttcactgctactgctgtggtggatcaggaattcaaggagatttccttatctcagtacaaagggaagtacgtggtgttgttcttctatccgttggacttcacttttgtttgccctacggagatcaccgcgtttagcgatcgctattcagatttctccagcaagaacactgaagttcttggcgtctccgtagacagccaattcagtcatctgtcgtggattcaaacagctcgcaaccagggcggccttggcgacatcaactatcccttggtgtctgacctgaagaaagaaattgcgaccgcttacaacgttcttgatgacgcagagggtgttgccttgcgtggcttgttcatcatcgatcctgatggtgtaatcatgcattccacgatcaacaacctgcccgttggtcgcaatgttgatgagacccttcgtgtgttgcaggccttccagtacgtccaggctaatcctgacgaagtgtgccccgcaaactggactcctggtgaaaaaacaatgaagccagacccagaaggtagcaaagaatatttttccgcaattagctaa

SEQ ID NO: 10912 - protein, 203 aa, Synechococcus sp. CC9902
MTIMTDNGCLRVGQKAPDFTATAVVDQEFKEISLSQYKGKYVVLFFYPLDFTFVCPTEITAFSDRYSDFSSKNTEVLGVSVDSQFSHLSWIQTARNQGGLGDINYPLVSDLKKEIATAYNVLDDAEGVALRGLFIIDPDGVIMHSTINNLPVGRNVDETLRVLQAFQYVQANPDEVCPANWTPGEKTMKPDPEGSKEYFSAIS

SEQ ID NO: 10913 - DNA, 591 bp, Chlorobium chlorochromatii CaD3
  CDS (1)..(591): transl_table=11
atgagtgtacttgtaggacgtaaagcgcctgaatttgatgttgctgccgttgttaatggctcacagtttgttgactcgtgcaaactctctgattttaaaggaaagtatgtggtgctctttttctatccgcttgactttacctttgtttgcccaaccgagcttcacgcatttcaagaaaaaattgaagagttcaaaaagcgcaatgttgaagtgcttggctgctcaatagactcaaagttttcacactttgcatggttgcgcactccccgctcgcaaggcggcattgaaggcgtaacttatacgttgctttccgacatcaacaaaacggtggcggctgattacgatgtgttacttgaagatgaaggcgttgcgctgagaggcttattcttaattgaccgcgatggcgttgtgcagcatcaagtaataaacaatttgtcgcttgggcgcaatgtggacgaagtgttgcgattaattgatgcgcttcagtttaccgaagagtttggcgaagtgtgccctgcaaactggaataaaggcgataaagcaatgaagcctacgcaaggcggattggaagagttttataaggaaggataa

SEQ ID NO: 10914 - protein, 196 aa, Chlorobium chlorochromatii CaD3
MSVLVGRKAPEFDVAAVVNGSQFVDSCKLSDFKGKYVVLFFYPLDFTFVCPTELHAFQEKIEEFKKRNVEVLGCSIDSKFSHFAWLRTPRSQGGIEGVTYTLLSDINKTVAADYDVLLEDEGVALRGLFLIDRDGVVQHQVINNLSLGRNVDEVLRLIDALQFTEEFGEVCPANWNKGDKAMKPTQGGLEEFYKEG

SEQ ID NO: 10915 - DNA, 603 bp, Synechococcus sp. CC9605
  CDS (1)..(603): transl_table=11
atgaccgacaccggttgcttgcgtgtgggccagctggcccctgatttcacagccaccgcagtggtggaccaggagttcaaggaagtcaccctgtcccagtatcggggcaagtacgtggtgctgttcttctatccactggatttcaccttcgtttgcccgactgaaatcacggctttcagcgaccgctacgccgatttctccagcaagaacaccgaggttctcggcgtttccgtggacagccagttcagccacctggcttggatccagacccctcggaatcagggtggcctgggcgatatcaactatcccctcgttgccgacctgaagaaggaaatctccacggcctacaacgttctcgatgacgctgagggtgttgccctgcgtggtctgttcatcatcgaccccgatggtgtgatcatgcatgccaccattaacaacctgcctgttggccgcaacgtggatgagaccctgcgggttctgcaggccttccagtacgtgcagtccaaccccgatgaggtttgcccggccaactggactcctggtgaaaagaccatgaagcctgatcccaagggttccaaggaatacttctccgccatcggctga

SEQ ID NO: 10916 - protein, 200 aa, Synechococcus sp. CC9605
MTDTGCLRVGQLAPDFTATAVVDQEFKEVTLSQYRGKYVVLFFYPLDFTFVCPTEITAFSDRYADFSSKNTEVLGVSVDSQFSHLAWIQTPRNQGGLGDINYPLVADLKKEISTAYNVLDDAEGVALRGLFIIDPDGVIMHATINNLPVGRNVDETLRVLQAFQYVQSNPDEVCPANWTPGEKTMKPDPKGSKEYFSAIG

SEQ ID NO: 10917 - DNA, 606 bp, Geobacter metallireducens GS-15
  CDS (1)..(606): transl_table=11
atgtgcatgtgtaccctcgtcaccaaagaggcccctgatttcgcagccgacgctgtcctgcccgacaacaccttcgccaccatcaagctgtcgagctttcgtgggaaatacgtgatcctcttcttctatcccctggacttcacctttgtctgcccctcggaaatcctcgccttcaacaaaaagctggaccagttcaaggccaaaaactgcgaggtcatcggcgtctccgtggattcgaagttcacccacctggcctggaaaaacacgaaggtggaagatggcggcatcggcaacatccagtaccccctggtgtcagacctgaagaaggagatcgccacccagttcggcgttctcttcgagaacggcggcgtcgcccttcggggactctttctcatcgataccaaggggatcgtccgccacgctgtcatcaacgacctccccttgggtcggagcgttgacgaggccctgcggatgctggacgccctccagttcgtggaaacccacggcgaccaggtctgccctgccaactggcgggagggtgacgaggccatgaagcccacggccgccggcgttgccgactacctggcgaagcatgccgcagggtag

SEQ ID NO: 10918 - protein, 201 aa, Geobacter metallireducens GS-15
MCMCTLVTKEAPDFAADAVLPDNTFATIKLSSFRGKYVILFFYPLDFTFVCPSEILAFNKKLDQFKAKNCEVIGVSVDSKFTHLAWKNTKVEDGGIGNIQYPLVSDLKKEIATQFGVLFENGGVALRGLFLIDTKGIVRHAVINDLPLGRSVDEALRMLDALQFVETHGDQVCPANWREGDEAMKPTAAGVADYLAKHAAG

SEQ ID NO: 10919 - DNA, 603 bp, Thiomicrospira crunogena XCL-2
  CDS (1)..(603): transl_table=11
atgtcagtattagttactaaaaaagcgcccgattttacttcagccgccgttcttgcagacggaacgattgtggacgacttcaacctaaaaagccacattgacggaaagtatgccgttgtgttcttttaccctctagacttcacatttgtttgtccatcagaaattctggcatttgaccatcgtgtcgaaaaattcaaagaactgggcactgaagtgatcggtgtttctgttgactctcaattcactcacaacgcatggcgcaacacccctgtaaacgaaggtggactagggcctgttaaattcccattggttgcagatttaggtgggtcaatcatggacgcttacggcattgtgcacccaggtaacgttgcactgcgtggtgcattcttaatcgacaaagaaggggtggttcgtcaccaagttgtcaacgatttacctttaggtcgtaacgttgacgaaatggttcgtatggttgaagcccttcaattccacgaagaaaatggtgaagtttgcccagccggttggaacaaaggcgacgaagggatgaaagattctcctgaaggtgtggctgactacctttcaaaacacggtgaagagctataa

SEQ ID NO: 10920 - protein, 200 aa, Thiomicrospira crunogena XCL-2
MSVLVTKKAPDFTSAAVLADGTIVDDFNLKSHIDGKYAVVFFYPLDFTFVCPSEILAFDHRVEKFKELGTEVIGVSVDSQFTHNAWRNTPVNEGGLGPVKFPLVADLGGSIMDAYGIVHPGNVALRGAFLIDKEGVVRHQVVNDLPLGRNVDEMVRMVEALQFHEENGEVCPAGWNKGDEGMKDSPEGVADYLSKHGEEL

SEQ ID NO: 10921 - DNA, 597 bp, Sulfurimonas denitrificans DSM 1251
  CDS (1)..(597): transl_table=11
atgttagtaacaaatcaagctccagacttcagcgcaacggcggttttagcagatgggtcaatcgttgaaaactttaaactctcagaaaattttggaaaaaaaggtacagttttgtttttctatccactagactttacttttgtatgtccatctgaaatcattgcgttttctcatagaatagaggagtttaagagtcgtgatgtaaatgtaattggtgtttcagttgatagccaattttcacactttgcatggagagagactccagtaaacagcggtggtatcggtcgcataaaataccctcttgttgcagaccttacaaaacaaatctcaagagattatgatgtgctctttggcgagtctgttgcacttcgtggctcattcttgattgatggaaaaggtgttgtacgtcatgctgttataaatgacttgccacttggaagaaatattgatgagatgattcgtatggttgacgctatgcagtttactgatgagcatggtgaagtttgtgcggcaggatggcaaaaaggtgatgagggaatgaaagcttctactgagggtgttgctgagtacttatcaaagcacgaaaataacctataa

SEQ ID NO: 10922 - protein, 198 aa, Sulfurimonas denitrificans DSM 1251
MLVTNQAPDFSATAVLADGSIVENFKLSENFGKKGTVLFFYPLDFTFVCPSEIIAFSHRIEEFKSRDVNVIGVSVDSQFSHFAWRETPVNSGGIGRIKYPLVADLTKQISRDYDVLFGESVALRGSFLIDGKGVVRHAVINDLPLGRNIDEMIRMVDAMQFTDEHGEVCAAGWQKGDEGMKASTEGVAEYLSKHENNL

SEQ ID NO: 10923 - DNA, 585 bp, Prochlorococcus marinus str. MIT 9312
  CDS (1)..(585): transl_table=11
atgagcttaagagttggacaagaagcaccagatttcactgctacagcagtatacgatcaagagtttaaggaaattacactttcaggtctaagaggtaagtgggttgttttattcttttacccattagactttacatttgtatgtccaactgagatcacagcatttagtgatagatatcaagatttctcatcaattgatgcggaaatacttggtgtatcagttgatagcaaacactgtcatttagcttggatacaaactccgagaaatgagggtggaataggtgatattaactacccattagtttctgatttaaaaagagaaatttgccaggcatataacgttttaaatgatgatggtgaagcagatagaggtttatttctcatcaatcctgaaggaatagttatgcatacgactgttaacaaagctcctgtaggtagaaatgttgatgaaacattaagaatccttcaaggctatcaatacgtcgctgcaaaccccgatgaagtatgtcctgcaaactggacccccggggagaagacaatgttagaggaccctaaaggtagtaaagaatatttttctgcgctatag

SEQ ID NO: 10924 - protein, 194 aa, Prochlorococcus marinus str. MIT 9312
MSLRVGQEAPDFTATAVYDQEFKEITLSGLRGKWVVLFFYPLDFTFVCPTEITAFSDRYQDFSSIDAEILGVSVDSKHCHLAWIQTPRNEGGIGDINYPLVSDLKREICQAYNVLNDDGEADRGLFLINPEGIVMHTTVNKAPVGRNVDETLRILQGYQYVAANPDEVCPANWTPGEKTMLEDPKGSKEYFSAL

SEQ ID NO: 10925 - DNA, 597 bp, Synechococcus elongatus PCC 7942
  CDS (1)..(597): transl_table=11
atgaccgaaggagccctgcgcgtcggccaattggcccccgattttgaagcgactgcagtcgttgatcaggaattccagacgatcaagctatccaattaccggggcaaatacgtcgttctgttcttctatcccctcgacttcacctttgtttgcccgaccgaaattactgcttttagcgatcgctatgcagacttttcagccctgaacaccgaaatcttgggtgtctcggtcgatagccaattcagccacttggcttggattcaaaccagccgtaaagaaggtggtttgggtgacttggcttacccgctggttgctgacctcaagaaagaaatcagcactgcctacaacgtgcttgatccggctgaaggcattgccctgcgcggtctgttcatcatcgacaaagaaggtgtgatccagcacgccaccatcaacaacctggcgtttggccgcagcgttgatgaaaccctgcgggtgctgcaagccattcagtacgtccaaagtcaccccgatgaagtttgccccgccaattggcaaccgggtgcagcgacgatgaaccccgaccctgttaagtcgaaagagttcttcgctgcagtctag

SEQ ID NO: 10926 - protein, 198 aa, Synechococcus elongatus PCC 7942
MTEGALRVGQLAPDFEATAVVDQEFQTIKLSNYRGKYVVLFFYPLDFTFVCPTEITAFSDRYADFSALNTEILGVSVDSQFSHLAWIQTSRKEGGLGDLAYPLVADLKKEISTAYNVLDPAEGIALRGLFIIDKEGVIQHATINNLAFGRSVDETLRVLQAIQYVQSHPDEVCPANWQPGAATMNPDPVKSKEFFAAV

SEQ ID NO: 10927 - DNA, 624 bp, Magnetospirillum magneticum AMB-1
  CDS (1)..(624): transl_table=11
atgtccgacacgattcagagcccgacctccctggtcaccaaagccgcccctgacttcaccgccccggcggtgatgccggacaacgagatcaatccggcgttcaacctgaagtcgtacctggctggctcctacggcatcgtgttcttctatccgctggacttcaccttcgtgtgtccgtcggagatcctggcccacgatcaccgcgtcaaggccttcgccgagcgcaacaccaaggtcatcgccgtcagcgtcgattcccacttcacccacctggcctggaagaacacccccgtcgacaagggcggcctgggcaacgtccagttccccatggtggccgacctgaccaaggacatcgccaagtcctatggcgtcctgctgccgggtggcgtggcgctgcgcggcaccttcgtgatcgacaagaacggcgtggtccagtcggcccatgtgaacaacctgccgctgggccgcaacgtggacgaggcgctgcgcctgatcgacgcgctgcagttctcggaagagcatggcgaggtctgccccgccggctggaacaagggcaaggccggcatgaagcccaatcccaacggcgttgccgaatacctggccaagcacgcttccgagctgtaa

SEQ ID NO: 10928 - protein, 207 aa, Magnetospirillum magneticum AMB-1
MSDTIQSPTSLVTKAAPDFTAPAVMPDNEINPAFNLKSYLAGSYGIVFFYPLDFTFVCPSEILAHDHRVKAFAERNTKVIAVSVDSHFTHLAWKNTPVDKGGLGNVQFPMVADLTKDIAKSYGVLLPGGVALRGTFVIDKNGVVQSAHVNNLPLGRNVDEALRLIDALQFSEEHGEVCPAGWNKGKAGMKPNPNGVAEYLAKHASEL

SEQ ID NO: 10929 - DNA, 609 bp, Synechococcus sp. JA-3-3Ab
  CDS (1)..(609): transl_table=11
atgtctcaggaaggatgtctgcgggtggggcagcccgctcccgatttttcggccactgccgtttacgacatggaatttaagacggtgaggctctccgactaccggggcaagaagtacgtggtgctgttcttctaccccttggacttcaccttcgtctgcccgacggagatcacggctttcagcgatcgctacgacgagtttgccaagctggacacggagatcctcggcgtctcggtggatagcgagtactctcacctggcctggattcagaccgaccgcaaagccggaggggtgggcgagctgaggtatccgctggtctccgacctgaaaaaggagatcagcgccgcctacaatgtcctggatccggcggcaggggtggctttgcgcggcctgttcatcatcgacaaggaagggatcatccagcacgccaccatcaacaacctggcctttggccgcagcgtggatgaaaccctgcgcaccctgcaggccatccagtacgtgcaagctcaccccgatgaagtttgcccggccaactggcagcccggccagagaaccctgaaccccgacccggtgaaatccaaggagttcttcgcggcggttgccaagtag

SEQ ID NO: 10930 - protein, 202 aa, Synechococcus sp. JA-3-3Ab
MSQEGCLRVGQPAPDFSATAVYDMEFKTVRLSDYRGKKYVVLFFYPLDFTFVCPTEITAFSDRYDEFAKLDTEILGVSVDSEYSHLAWIQTDRKAGGVGELRYPLVSDLKKEISAAYNVLDPAAGVALRGLFIIDKEGIIQHATINNLAFGRSVDETLRTLQAIQYVQAHPDEVCPANWQPGQRTLNPDPVKSKEFFAAVAK

SEQ ID NO: 10931 - DNA, 609 bp, Synechococcus sp. JA-2-3B'a(2-13)
  CDS (1)..(609): transl_table=11
atgtctcaggaaggatgcctgcgagtggggcagcccgctcccgatttttcggccaccgccgtctatgacatggaattcaagacggtgaagctctccgactaccggggtaagaagtatgtggtgctgttcttctaccccttggacttcacctttgtctgcccaacggagatcacggcctttagcgaccgctatgacgactttgccaagctggataccgagatcctgggcgtctcggtggacagcgaatactctcacttggcctggatccagaccgaccgcaaagccggaggggtgggcgagctaaggtatcctctggtctctgacctgaaaaaggagatcagcgctgcctacaatgttctggatccggaggccggtgtggcgctgcgcggcctgttcatcatcgacaaagaagggatcatccagcacgccaccattaacaacctggcctttggccgcagtgtggatgaaaccttgcgcaccctgcaagctatccaatacgtgcaatctcaccccgatgaagtttgcccggccaactggcagcccggccagaaaaccatgcaccccgacccagtgaaatccaaggagttcttcgcggcgattgccaagtag

SEQ ID NO: 10932 - protein, 202 aa, Synechococcus sp. JA-2-3B'a(2-13)
MSQEGCLRVGQPAPDFSATAVYDMEFKTVKLSDYRGKKYVVLFFYPLDFTFVCPTEITAFSDRYDDFAKLDTEILGVSVDSEYSHLAWIQTDRKAGGVGELRYPLVSDLKKEISAAYNVLDPEAGVALRGLFIIDKEGIIQHATINNLAFGRSVDETLRTLQAIQYVQSHPDEVCPANWQPGQKTMHPDPVKSKEFFAAIAK

SEQ ID NO: 10933 - DNA, 603 bp, Neorickettsia sennetsu str. Miyayama
  CDS (1)..(603): transl_table=11
atgtctactttagttggtaagaaagcgtttgatttcacagcaaaggctgtactcaagaacggttctttttgtgatgattttaatcttcagcgtgaattgtctggcaaatacggggtgctcttcttttatccattggattttacttttgtctgtccaacggagattattgctttcagtaataggattcctgcgtttatcgagagaaatgcggttgttgtaggtgttagtgttgactcccatttttcgcactttgcctggcgcagcttgcctgtaaaagatggtggaataggcagtattggttacactctggtctcagacataacaaagtctatttcacgtgactaccaggttttgctagacgatgcagttgctcttcgtggtacatttatcatagatccgaattttgttatcagagttgctcatgttaatgacctgaacgtgggtcggaacgtcgatgaggttctccgtactttggatgcgctcaagtatagtgacgaaaatggagaggtttgtccggcaggttggagcaagggcaaagaagcgataaaggcgacgcatgagagtatttccgattatctagcttccaatagggatgagctttga

SEQ ID NO: 10934 - protein, 200 aa, Neorickettsia sennetsu str. Miyayama
MSTLVGKKAFDFTAKAVLKNGSFCDDFNLQRELSGKYGVLFFYPLDFTFVCPTEIIAFSNRIPAFIERNAVVVGVSVDSHFSHFAWRSLPVKDGGIGSIGYTLVSDITKSISRDYQVLLDDAVALRGTFIIDPNFVIRVAHVNDLNVGRNVDEVLRTLDALKYSDENGEVCPAGWSKGKEAIKATHESISDYLASNRDEL

SEQ ID NO: 10935 - DNA, 618 bp, Chlamydophila felis Fe/C-56
  CDS (1)..(618): transl_table=11
atgcataatcataaaaatagggtggtaatgggatcgcttttcgttgggaaaactgccccagatttttctgcacaagcagtagttgatggtgaagtaaagaatatttccttgaaagattatcgtggtaaatacgttattcttttcttttatcctaaagattttacatatgtttgtcctaccgagcttcatgcttttcaacattctttagaagaattcgaatcccgcggcgcacaaattttggggtgctccgttgacgatcttgatacccacaagcgttggttagaaactgataaaaaagctggtggagttaaaggtattacctatcctctaatttctgacacaactcaggagctttctaaactctatagtgttttagacttacagtctggattatcattccgtggatcatttctgatcgataaagatgggataattagacatatggtaataaacgatcttcctttaggtcgttctatagatgaagagcttcgtgtattagacgcgttaattttcttcgagaatcatggattagtatgtcctgcaaattggcagcaaggacagaaagctatggctcccaatgaagaaggtttgaaagagtacttcggaactatcgattag

SEQ ID NO: 10936 - protein, 205 aa, Chlamydophila felis Fe/C-56
MHNHKNRVVMGSLFVGKTAPDFSAQAVVDGEVKNISLKDYRGKYVILFFYPKDFTYVCPTELHAFQHSLEEFESRGAQILGCSVDDLDTHKRWLETDKKAGGVKGITYPLISDTTQELSKLYSVLDLQSGLSFRGSFLIDKDGIIRHMVINDLPLGRSIDEELRVLDALIFFENHGLVCPANWQQGQKAMAPNEEGLKEYFGTID

SEQ ID NO: 10937 - DNA, 600 bp, Trichodesmium erythraeum IMS101
  CDS (1)..(600): transl_table=11
atgacagacgaatgcctgcgtgtgggccaaaaggctccggattttacagctacagctgtagtggatcaggaattcgagacaattaaactgtctgattatcgtggtaagtatgtagtcttgttcttctatcccttggattttacttttgtttgcccaaccgaaattacagcgtttagcgatcgttataaagagtttgagttacttaacactgaaattttaggagtttctgtggacagtgaattttcacatctagcttggattcaaacagatcgtaagtctggaggtattggggatcttaattaccccctattatctgatataaagaaagaaattagtacagcctacaatgttttagatctagaggctggtattgctctgcgaggattatttattattgatagagaaggtattatccagcacgcaactgttaataattttgcttttggccgcaatgtggatgaagctatccgcactctacaagctattcaatatgtacaaattcacccaaatgaagtttgtcctgtgggctggaaaccaggggataaaactatgaattctgatccaattaagtctaaagaattttttgctgctgtttcataa

SEQ ID NO: 10938 - protein, 199 aa, Trichodesmium erythraeum IMS101
MTDECLRVGQKAPDFTATAVVDQEFETIKLSDYRGKYVVLFFYPLDFTFVCPTEITAFSDRYKEFELLNTEILGVSVDSEFSHLAWIQTDRKSGGIGDLNYPLLSDIKKEISTAYNVLDLEAGIALRGLFIIDREGIIQHATVNNFAFGRNVDEAIRTLQAIQYVQIHPNEVCPVGWKPGDKTMNSDPIKSKEFFAAVS

SEQ ID NO: 10939 - DNA, 579 bp, Synechococcus sp. CC9311
  CDS (1)..(579): transl_table=11
atgggccaacaggcccctgatttcaccgccaccgctgtagtggatcaggagttccaagagatcagcttgtctcagtaccgcggcaagtatgtggtcctgtttttctaccctctagacttcacctttgtctgcccaacagaaatcacggcgttcagcgatcgctactccgatttctcaagcaaaaacactgaagtgctgggtatttccgtagacagccaattcagtcaccttgcctggatccaaaccgcacgcaatcaaggcggaatcggcgatattaactatccgctcgtttcagacctgaagaaagaaatttccactgcttacaacgttctcgatgacgctgaaggcgtggctctgcgtggcttgttcatcatcgaccccgagggtgtgatcatgcacgccacgatcaacaacttgcctgttggccggaatgttgacgagaccctccgagtacttcaggcattccagtacgttcagtcaaatccagatgaagtctgtccagctaactggacaccaggggagaagaccatgaagcctgatcccaagggcagcaaagagttttttgctgcaattggctga

SEQ ID NO: 10940 - protein, 192 aa, Synechococcus sp. CC9311
MGQQAPDFTATAVVDQEFQEISLSQYRGKYVVLFFYPLDFTFVCPTEITAFSDRYSDFSSKNTEVLGISVDSQFSHLAWIQTARNQGGIGDINYPLVSDLKKEISTAYNVLDDAEGVALRGLFIIDPEGVIMHATINNLPVGRNVDETLRVLQAFQYVQSNPDEVCPANWTPGEKTMKPDPKGSKEFFAAIG

SEQ ID NO: 10941 - DNA, 582 bp, Leptospira borgpetersenii serovar Hardjo-bovis L550
  CDS (1)..(582): transl_table=11
atgccgcaggttacatccctagcaccggattttaaagcagaagctgttcttggaaaagagatcaaggaaattaaactttcagactataaaggaaaatgggtagtgttattcttttacccgcttgactttactttcgtttgtccgactgaaattatcgaatacgataacaaacttccggaattcaaaaaactcggagcggaaatactgggagtttctgtggattcagcttttactcatttagcttggaaaaatactcctaaaaaagaaggtggaatcggagacatcaaataccctctgattgcggatcttactaagtccatttctagagattacaatgttttaacggatggtggagttgctttaagaggaacttttatcattgatccagccggtctgattcgtcaggcgactatcaacgatcttcctgtgggacgtaatattgacgaggcgatccgattgatcaaagctttccaatttgtcgaaaaacacggcgaagtttgcccggcaaactgggatgagggaaagaaaacgatgaaagccgatccggaaaaatctaaggattacttctcggcggtaaattga

SEQ ID NO: 10942 - protein, 193 aa, Leptospira borgpetersenii serovar Hardjo-bovis L550
MPQVTSLAPDFKAEAVLGKEIKEIKLSDYKGKWVVLFFYPLDFTFVCPTEIIEYDNKLPEFKKLGAEILGVSVDSAFTHLAWKNTPKKEGGIGDIKYPLIADLTKSISRDYNVLTDGGVALRGTFIIDPAGLIRQATINDLPVGRNIDEAIRLIKAFQFVEKHGEVCPANWDEGKKTMKADPEKSKDYFSAVN

SEQ ID NO: 10943 - DNA, 591 bp, Chlorobium phaeobacteroides DSM 266
  CDS (1)..(591): transl_table=11
atgggcgtactggttggtcgcaaggcaccggaattttgtgtggaggcggtaacgggcgggtcccggtttgttgatgcatgccgtctttcggattatgcgggaaagtatgtggtgttgtttttctacccgcttgattttacgtttgtttgtcctaccgagcttcatgcatttcaggacaagcttgatgagttcacaaagagaaacgttgaggttatcggttgttcggttgattcgaagttttctcactttgcatggctgcagaccccgagaaaccggggaggaattgaaggggtgacctatacgctcctttcggatatcaataaaaccgtttcatccgattacgatgttctggtcgatggagcaggcatatcgcttcgaggcttgtttcttattgatcgcgagggtgttgtgcgccatcaggttgtcaatgatctcgggctcggcagaaatgttgatgaggtactcagaatgattgatgccttgcagtttaccgaggagtttggtgaggtttgtcctgcaaactggaacaagggcgataaaaccatgaagcctgatgatgaggggctcaaagagttcttcaaggatgcctga

SEQ ID NO: 10944 - protein, 196 aa, Chlorobium phaeobacteroides DSM 266
MGVLVGRKAPEFCVEAVTGGSRFVDACRLSDYAGKYVVLFFYPLDFTFVCPTELHAFQDKLDEFTKRNVEVIGCSVDSKFSHFAWLQTPRNRGGIEGVTYTLLSDINKTVSSDYDVLVDGAGISLRGLFLIDREGVVRHQVVNDLGLGRNVDEVLRMIDALQFTEEFGEVCPANWNKGDKTMKPDDEGLKEFFKDA

SEQ ID NO: 10945 - DNA, 600 bp, Crocosphaera watsonii WH 8501
  CDS (1)..(600): transl_table=11
atgactatggaaggatgcttgcgagttgggcaacttgcacccgattttacggcaacagttgttattgatcaagaatttcagacaaaaaagctttctagctaccgtggtaagtatgttatcctctttttctatcccctggattttacttttgtttgtcccaccgaagtcatcgcctttagtgagcgctacgaagaattttctaaaatcaacacagaaattttagcagtttccgtcgatagcgagttttcccatctcgcctggattcaaactcctcgcaccgaagggggtgtgggagatgtggcctatcctttagtctctgacctgaaaaaagacattagtaatgcctataatgtactcgatcctgagtctggagtggccttgcggggtttatttattatagataaagaagggattattcaacactcaactatcaataatctctctttcgggcggagtgttagcgaaactctacgtaccctcaaagctatccagcacgttcaaaataatcccgaagaggtttgtccggctgactggcaagaaggggataaaaccatgatccctgatcctattaagtctaagatttatttctctgctgtttga

SEQ ID NO: 10946 - protein, 199 aa, Crocosphaera watsonii WH 8501
MTMEGCLRVGQLAPDFTATVVIDQEFQTKKLSSYRGKYVILFFYPLDFTFVCPTEVIAFSERYEEFSKINTEILAVSVDSEFSHLAWIQTPRTEGGVGDVAYPLVSDLKKDISNAYNVLDPESGVALRGLFIIDKEGIIQHSTINNLSFGRSVSETLRTLKAIQHVQNNPEEVCPADWQEGDKTMIPDPIKSKIYFSAV

SEQ ID NO: 10947 - DNA, 603 bp, Synechococcus sp. RS9917
  CDS (1)..(603): transl_table=11
atgaccgccaacggctgcctgcgtgtgggccaacaggcccctgatttcaccgccaccgcagtggttgaccaggagttcaaggagatctccctgtctcagtaccgcggcaagtatgtggtgctgttcttctaccccctcgatttcaccttcgtctgcccgacggaaatcaccgccttcagcgatcgctacgctgatttctccagcaagaacaccgaagtgctgggcgtgtcggtggacagccagttcagccacctcgcctggatccagaccccccgcaatcagggtggtctgggtgacatcgcctatcccctcgtcgctgacctcaagaaagagatcgccagcgcttacaacgtgctcgatgaagaggaaggcgttgccctccgcggtctgttcatcatcgaccccgaaggcgtgatcatgcacgccaccatcaacaacctgcccgtgggccgcaacgttgatgaaaccctgcgtgtgctccaggccttccagtatgtgcagtcgcaccccgatgaggtctgccccgccaactggacccctggcgagaagaccatgaagcccgatcccgtcggttccaaggagttcttcgcagctgtcaactga

SEQ ID NO: 10948 - protein, 200 aa, Synechococcus sp. RS9917
MTANGCLRVGQQAPDFTATAVVDQEFKEISLSQYRGKYVVLFFYPLDFTFVCPTEITAFSDRYADFSSKNTEVLGVSVDSQFSHLAWIQTPRNQGGLGDIAYPLVADLKKEIASAYNVLDEEEGVALRGLFIIDPEGVIMHATINNLPVGRNVDETLRVLQAFQYVQSHPDEVCPANWTPGEKTMKPDPVGSKEFFAAVN

SEQ ID NO: 10949 - DNA, 594 bp, Blastopirellula marina DSM 3645
  CDS (1)..(594): transl_table=11
atgagcgtattggttacgaaggaagcgcctgatttcaccgccactgcggttacagaaaccggcgaattcaaagacgtcagcctgtcggactacaaaggacagtacgtcctgttgttcttctacccgctcgacttcaccttcgtttgcccgaccgagatcatcgcgttctcggatcgcatcgaagatttcaaagcgctcggcgtgcaggtcttgggctgctcgatcgatagccacttctcgcatctggcttggcgcaacactccccgcggcgacggtggtatcggcgacatccagtacccgctgatcgctgacctcgataagagcatcgcgaccaagtacgacgtgctgctgccaggcggcatcgcgcttcgcggcttgttcctgattgacaccaagggtgtcgttcgtcaccaagtggtcaacgatctgccgctgggccgaagcgttgacgaagcgctgcgcatggtcaaagcgctccagttccacgaagtgaacggcgaagtttgcccggccaactggaaagaaggctcccgtacgatcaaaccgacgccgagcgattcgaaagaattctttggcgccgaatacgccggctag

SEQ ID NO: 10950 - protein, 197 aa, Blastopirellula marina DSM 3645
MSVLVTKEAPDFTATAVTETGEFKDVSLSDYKGQYVLLFFYPLDFTFVCPTEIIAFSDRIEDFKALGVQVLGCSIDSHFSHLAWRNTPRGDGGIGDIQYPLIADLDKSIATKYDVLLPGGIALRGLFLIDTKGVVRHQVVNDLPLGRSVDEALRMVKALQFHEVNGEVCPANWKEGSRTIKPTPSDSKEFFGAEYAG

SEQ ID NO: 10951 - DNA, 600 bp, Synechococcus sp. WH 7805
  CDS (1)..(600): transl_table=11
atgaccgccaacggttgtctgcgcgtgggccatcaggcccccgacttcaccgccacagcagtggttgaccaggaatttaaggagatcagcctgtcacagtaccgcggcaagtacgtggtgctgttcttctaccccctcgacttcaccttcgtgtgccccacggagatcacggcattcagcgatcgctacgccgatttctccagcaagaactgcgaaatcctcggcgtctccgtcgacagtaaattcagccatttggcctggattcagactccccgcaatcagggtggtatcggtgacatcaattatccgcttgtcgctgacctcaacaaagagatcggcaatgccttcaatattcttgacgacgaaggcaaagcactgcgtggcctgtatctgattgatcccgacggtgtgattgttcacgccaccatcaacaatctgcccgtgggcagaaacgttgatgagaccctccgtcttctgcaagcattccagtacgttcagtccaaccctgacgaggtttgccctgccaactggactcctggctccgccaccatgcttgaggatcccaaaggttccaaagagtatttctccgccatcggctga

SEQ ID NO: 10952 - protein, 199 aa, Synechococcus sp. WH 7805
MTANGCLRVGHQAPDFTATAVVDQEFKEISLSQYRGKYVVLFFYPLDFTFVCPTEITAFSDRYADFSSKNCEILGVSVDSKFSHLAWIQTPRNQGGIGDINYPLVADLNKEIGNAFNILDDEGKALRGLYLIDPDGVIVHATINNLPVGRNVDETLRLLQAFQYVQSNPDEVCPANWTPGSATMLEDPKGSKEYFSAIG

SEQ ID NO: 10953 - DNA, 591 bp, Chlorobium ferrooxidans DSM 13031
  CDS (1)..(591): transl_table=11
atgggtgttttagtcggccgcaaggcgccggattttgatgttgcagcagttgtcaacggctcgcagtttgttgattcatgcaagctttccttataccacggaaagtatgttgtgctctttttctatccgcttgatttcacctttgtctgtccgacagagctgcacgcattccaggagaagctcgatgagttcaagaagagaaatgttgagctgatcggctgctcggttgactcaaagttctcccattttgcatggctgcagaccccgagaagcaggggcggtattcagggtgtaacctatacccttctttctgatatcaacaagacgatttcggcagactacgatgtgctgcttgagggtgccggaattgctcttagaggcctcttcctgattgacaaggagggtgttgtccgtcaccaggttgtcaacgatctgccgcttggccgcaatgttgatgaggtgcttcgtctggttgacgcattgcagtttaccgaagagcatggcgaagtttgcccggcaaactggaacaagggtgacaagaccatgaagccgacagatgacgggttgaaggagttcttcaaggaggcttaa

SEQ ID NO: 10954 - protein, 196 aa, Chlorobium ferrooxidans DSM 13031
MGVLVGRKAPDFDVAAVVNGSQFVDSCKLSLYHGKYVVLFFYPLDFTFVCPTELHAFQEKLDEFKKRNVELIGCSVDSKFSHFAWLQTPRSRGGIQGVTYTLLSDINKTISADYDVLLEGAGIALRGLFLIDKEGVVRHQVVNDLPLGRNVDEVLRLVDALQFTEEHGEVCPANWNKGDKTMKPTDDGLKEFFKEA

SEQ ID NO: 10955 - DNA, 648 bp, Mariprofundus ferrooxydans PV-1
  CDS (1)..(648): transl_table=11
atgagtgtattggttggcaaacaagcccctgattttaccgctgcagctgtgatggcagacggttctatcaatgaagaattttcactgtccgactatgacggaaagtacgtcgttctgtttttctacccgctggacttcacctttgtatgtccgtcggagctgattgcatttgaccaccgtatcaaggagtttgaatcccgcggtgtacaggtaatcggttgttcggttgactcccagtttacccacgcagcatggcgcaatacgcctgtgaatgccggtggtatcggtcctgtatcttatccgctggtggcagatctgaccaagacgattgctgctgattacgatgtgctggttgataacgatggcattcaggatgaagatggcgatatggtccacctgctgggtggttcggttgccctgcgcggttcgttcctgatcgacaaggatggcactgtgcagcatcaggtagttaataacctgccgctgggccgtaacgtcgatgagatgctgcgtatgattgatgcactgcagttcactgaagagcatggtgaagtctgtcctgccggctggaacaagggcgagaagggcatggttcctgatgccgacggtgttgcatcctacctggcaagcgagtcagacaagctgtaa

SEQ ID NO: 10956 - protein, 215 aa, Mariprofundus ferrooxydans PV-1
MSVLVGKQAPDFTAAAVMADGSINEEFSLSDYDGKYVVLFFYPLDFTFVCPSELIAFDHRIKEFESRGVQVIGCSVDSQFTHAAWRNTPVNAGGIGPVSYPLVADLTKTIAADYDVLVDNDGIQDEDGDMVHLLGGSVALRGSFLIDKDGTVQHQVVNNLPLGRNVDEMLRMIDALQFTEEHGEVCPAGWNKGEKGMVPDADGVASYLASESDKL

SEQ ID NO: 10957 - DNA, 603 bp, Synechococcus sp. BL107
  CDS (1)..(603): transl_table=11
atgaccgataacggttgcctgcgtgtgggccaaaaggcccctgatttcactgctaccgccgtggtggatcaggaattcaaggagatctccttgtctcagtacaaagggaagtacgtggtgttgttcttctatccgttggacttcacgtttgtttgccctacggagatcaccgcgtttagcgatcgctactcagatttctccagcaagaacactgaagttctaggcgtttctgtggacagtcaattcagccatctgtcctggattcaaactgctcgtaaccagggtggtcttggcgatatcaactatcccttggtctctgatctgaagaaggagatcgcaacggcctacaacgtgcttgatgatgctgagggtgttgccttgcgtggcctgttcatcatcgatccagatggtgtgatcatgcattccacgatcaacaacttacccgttggtcgcaatgttgatgaaactctgcgtgtgttgcaggccttccagtacgttcaggccaaccctgacgaagtgtgcccagccaactggacacctggtgaaaaaacaatgaaacccgatcccgagggtagcaaagaatatttttctgctatcagctaa

SEQ ID NO: 10958 - protein, 200 aa, Synechococcus sp. BL107
MTDNGCLRVGQKAPDFTATAVVDQEFKEISLSQYKGKYVVLFFYPLDFTFVCPTEITAFSDRYSDFSSKNTEVLGVSVDSQFSHLSWIQTARNQGGLGDINYPLVSDLKKEIATAYNVLDDAEGVALRGLFIIDPDGVIMHSTINNLPVGRNVDETLRVLQAFQYVQANPDEVCPANWTPGEKTMKPDPEGSKEYFSAIS

SEQ ID NO: 10959 - DNA, 603 bp, Synechococcus sp. RS9916
  CDS (1)..(603): transl_table=11
atgaccgccaccggcgctctgcgcgtgggtcaacaggcccccgatttcaccgccaccgcagtggttgaccaggaattcaaagaggtcaccctgtcgcagtatcgcggcaagtacgtggtgctgttcttctaccccctcgacttcaccttcgtgtgccccacggagatcactgcattcagcgaccgctatgcagacttctccagcaagaacactgaagtgctgggcgtttctgtggacagccagttcagccacttggcttggattcaaactccccgcaaccagggtggccttggcgacatcgcctatcccctggtcgctgacctgaagaaggaaatcgctagcgcatacaacgtcctcgatgaggatgctggcgtggcactgcgtggcctgttcatcattgaccctgatggtgtgatcatgcactccaccatcaacaacctgcccgtgggtcgcaacgtcgacgagacgctccgcgtcctccaggccttccagtacgtgcagtctcaccccgatgaggtctgccccgcaaactggactcccggcgagaagaccatgaagcccgaccccgtcggcagcaaggagttcttcgccgcagtcaactga

SEQ ID NO: 10960 - protein, 200 aa, Synechococcus sp. RS9916
MTATGALRVGQQAPDFTATAVVDQEFKEVTLSQYRGKYVVLFFYPLDFTFVCPTEITAFSDRYADFSSKNTEVLGVSVDSQFSHLAWIQTPRNQGGLGDIAYPLVADLKKEIASAYNVLDEDAGVALRGLFIIDPDGVIMHSTINNLPVGRNVDETLRVLQAFQYVQSHPDEVCPANWTPGEKTMKPDPVGSKEFFAAVN

SEQ ID NO: 10961 - DNA, 597 bp, Lyngbya sp. PCC 8106
  CDS (1)..(597): transl_table=11
atggcagaagagtgcattcgcgttggtttatctgcaccggaatttaccgcaactgctgtcatcgatcaagaatttaagaccatcaagctgtctgactatcgcggcaaatatgttgtccttttcttttatccgctggacttcacttttgtttgcccgactgagattacagcatttagcgatcgcgctgaagaatttactaaactcaatacccaaatcctgggtgtttccgttgacagtgaattctcccatttagcttggattcaaagcgatcgcaaatcgggtggagttggtgacttaaaatatcccctggtttctgacatcaagaaagatatcagtgccgcttacaacgtcttagatcctgaagcgggaatcgcactgcggggattatttatcatcgataaggaaggcgttatccaacacgcgactatcaataacctcgcatttggtcgcaacgtggatgaaaccctacgcaccttgcaagccatccagtatgtacaggcgaatccagatgaggtttgtcctgcgggttggaagccaggtgaaaaaacgatgattcctgatccagtcaagtctaaagacttctttgctgcggtctaa

SEQ ID NO: 10962 - protein, 198 aa, Lyngbya sp. PCC 8106
MAEECIRVGLSAPEFTATAVIDQEFKTIKLSDYRGKYVVLFFYPLDFTFVCPTEITAFSDRAEEFTKLNTQILGVSVDSEFSHLAWIQSDRKSGGVGDLKYPLVSDIKKDISAAYNVLDPEAGIALRGLFIIDKEGVIQHATINNLAFGRNVDETLRTLQAIQYVQANPDEVCPAGWKPGEKTMIPDPVKSKDFFAAV

SEQ ID NO: 10963 - DNA, 612 bp, Nodularia spumigena CCY 9414
  CDS (1)..(612): transl_table=11
atgtccctcacttacgcaacagaaggatgcctccgcgttggtcaacaggctcctgaatttacagccacagctgtggtagatcaagaatttaagaccattaaactttccgactatcgcggtaagtatgtggttctgtttttctaccccttagactttacctttgtttgccccactgagatcacagcatttagcgatcgctacgaagaatttaagaaagttaacacagaagttctcggtgtttccgttgatagcgaattctctcacctagcctggattcaaactgaacgcaagtctggtggtgtcggcgacctcaattatcccttagtttcggacatcaaaaaagagattagcgccacctacaatgtccttgacccagccgcaggtattgctttacgcggtttgttcattattgataaagatggtatcatccagcattctacagtgaataacctcgcctttggtcgcagcgttgatgaaaccctgcggacattgcaagcccttcagtatgttcagtctcaccccgatgaagtttgcccagccggttggcaacctggtgatcaaacaatggttcctgaccctgtgaagtcgaaagtctacttctcggctgtctag

SEQ ID NO: 10964 - protein, 203 aa, Nodularia spumigena CCY 9414
MSLTYATEGCLRVGQQAPEFTATAVVDQEFKTIKLSDYRGKYVVLFFYPLDFTFVCPTEITAFSDRYEEFKKVNTEVLGVSVDSEFSHLAWIQTERKSGGVGDLNYPLVSDIKKEISATYNVLDPAAGIALRGLFIIDKDGIIQHSTVNNLAFGRSVDETLRTLQALQYVQSHPDEVCPAGWQPGDQTMVPDPVKSKVYFSAV

SEQ ID NO: 10965 - DNA, 543 bp, Bacillus sp. B14905
  CDS (1)..(543): transl_table=11
atggcagaacgcatggtaggtaaacaagcacctgactttacaatggaagcagtactttcagacaaatcatttggtaaagtatcattagaagatattaaagcacaagataaatggacagtacttttcttctatccaatggacttcacatttgtatgtccaacagaaatcactgcaatgagcgatcgttatgacgagttcgaagacttagatgcagaagtaatcggtgtttctactgatacaatccacactcacttagcgtggattaatacagaccgcactcaaaatggtcttggtgaattaaaatatccattagctgcggatacaaaccaccaagtttctaaagattacggtgtgttaattgaagaagaaggtatcgcgctacgtggcttattcatcattaatccagaaggtgaattaaaataccaaacagtattcgataataacatcggccgtgatgttgatgaaacgttacgtgtacttcaagcattacaaactggcggtctttgcccagcaaactggcgtccaggtcaagcaactctataa

SEQ ID NO: 10966 - protein, 180 aa, Bacillus sp. B14905
MAERMVGKQAPDFTMEAVLSDKSFGKVSLEDIKAQDKWTVLFFYPMDFTFVCPTEITAMSDRYDEFEDLDAEVIGVSTDTIHTHLAWINTDRTQNGLGELKYPLAADTNHQVSKDYGVLIEEEGIALRGLFIINPEGELKYQTVFDNNIGRDVDETLRVLQALQTGGLCPANWRPGQATL

SEQ ID NO: 10967 - DNA, 600 bp, Cyanothece sp. CCY 0110
  CDS (1)..(600): transl_table=11
atgaccatcgaaggatgcttgcgagttgggcaagttgcacctgattttacggcaacagtcgttattgatcaagaattccagacaaaaaaactttctagttaccgtggcaagtatgttgtcctttttttctatcctttggattttacctttgtttgccctacggaagtcattgcctttagcgatcgctacgaagagtttgctaagattaacacagaacttttagcggtttccgttgatagtgaattttcccatctggcctggattcaaacccctcgcacggaaggaggagtgggagacattgcctatcctttagtttctgacctgaaaaaagaaattagtaccgcttataatgtactcgatcctgattcaggtgttgcgttacggggcttatttattattgataaagaaggggttattcaatactcaaccgttaataatctttcgtttggtcgtagtgtcaccgaaaccctacgcaccctaaaagcgatacagcacgttcaaaccaatcccgaagaggtttgtccggcagattggcaagaaggggataaaaccatgatacctgaccccattaaatctaagatttatttctcagcggtttaa

SEQ ID NO: 10968 - protein, 199 aa, Cyanothece sp. CCY 0110
MTIEGCLRVGQVAPDFTATVVIDQEFQTKKLSSYRGKYVVLFFYPLDFTFVCPTEVIAFSDRYEEFAKINTELLAVSVDSEFSHLAWIQTPRTEGGVGDIAYPLVSDLKKEISTAYNVLDPDSGVALRGLFIIDKEGVIQYSTVNNLSFGRSVTETLRTLKAIQHVQTNPEEVCPADWQEGDKTMIPDPIKSKIYFSAV

SEQ ID NO: 10969 - DNA, 582 bp, Lentisphaera araneosa HTCC2155
  CDS (1)..(582): transl_table=11
atggctgtattagttggtaaacaagctccagacttcagcgaaaaagctgttaaaggtcaagaagttatcgaaaacttctctctctcacaattcaaaggaaaatacgttgtacttttcttctacccattagacttcactttcgtttgccctactgagcttcacgcttttgaagcaaagcgcgctgagttcgaagctaaaggcgttgaagttgttggtgtttcaactgactcgtggttctctcacctcgcatggctcaacactcctaagaaccaaggcggtatcgaaggcgttggttacccaatcgtttctgacttcaacaaaacaatctctgcagattacgacgttcttctcggtggtggtatggctcttcgcggtcttttcctcatcgacaaagaaggtgtagttcagcaccaagttgttaacaacctcccactcggtcgtaacgttgacgaagctatccgtatggttgatgctcttcagttcttcgaagctaacggtgaagtttgcccagcaaactggaacgaaggcgacaaagctatgaagccaaacgatgcaggtcttaaagaatacttcgctgaataa

SEQ ID NO: 10970 - protein, 193 aa, Lentisphaera araneosa HTCC2155
MAVLVGKQAPDFSEKAVKGQEVIENFSLSQFKGKYVVLFFYPLDFTFVCPTELHAFEAKRAEFEAKGVEVVGVSTDSWFSHLAWLNTPKNQGGIEGVGYPIVSDFNKTISADYDVLLGGGMALRGLFLIDKEGVVQHQVVNNLPLGRNVDEAIRMVDALQFFEANGEVCPANWNEGDKAMKPNDAGLKEYFAE

SEQ ID NO: 10971 - DNA, 702 bp, Flavobacteriales bacterium ALC-1
  CDS (1)..(702): transl_table=11
atgctaggtgtatatgtatctttgcagccaaattttaaatttaacataaaaaaaatattaaaaatggcagtattagtagggaaaaaagcacctcaatttaatgcgcaagcagtagtaaatggtagagaatttgtaacggattattctttagatcaatttataggtaaaaaacatgtggttttattcttttatcctaaagatttcacatttgtttgtccaactgagctacatgcttttcaagaaaaacttgaagaattcaaatctagaaacactgaagttgttgctgtatctacggatactgaacaatctcattttggttggttgcaaatggacaagaatcaaggaggtattaaaggggtaacatatccattagtagctgacactaataaaaccatctctaagaattatgatgttttagcaggtgattatttttatgatgaaaatgatatgctgcaagctgaaggagaattaatcgcttatagaggtttattcttaattgataaggaaggtattgtacgtcatcaaatcgtaaatgatttaccattaggtagaaatgttgatgaagcactacgtatggttgatgctttacaatttgtagaagaaaatggtgaggtttgtccagcaaattggaacaaaggaaaaactggtatgcaagctacacatgaaggtgttgcagaatttttagaaaaacatgttaattaa

SEQ ID NO: 10972 - protein, 233 aa, Flavobacteriales bacterium ALC-1
MLGVYVSLQPNFKFNIKKILKMAVLVGKKAPQFNAQAVVNGREFVTDYSLDQFIGKKHVVLFFYPKDFTFVCPTELHAFQEKLEEFKSRNTEVVAVSTDTEQSHFGWLQMDKNQGGIKGVTYPLVADTNKTISKNYDVLAGDYFYDENDMLQAEGELIAYRGLFLIDKEGIVRHQIVNDLPLGRNVDEALRMVDALQFVEENGEVCPANWNKGKTGMQATHEGVAEFLEKHVN

SEQ ID NO: 10973 - DNA, 549 bp, Paenibacillus sp. JDR-2
  CDS (1)..(549): transl_table=11
atggcagagcgtttggttggccgtccggctccagacttcaaaatggatacggcaacaggtgacggtaaagatttcggaacagcatcccttgctgattacaaaggtaaatggctggtattgttcttctacccactcgacttcacatttgtatgcccaactgaaattacagctttgagccttgcttccgagcaattcaaagctctgaatacagaagttcttggtgtatccgttgacagcaagcacagccaccgtgcatggatcaacactccggttaacgacaatggccttggcgaattgaacttcccgctggctgctgacattactaagagcgttgctcgtgactacggcgtcctgatcgaagaagaaggcgttgcattgcgcggcctgtacatcatcgatcctgaaggcgaagtaaaataccaagtcgttaaccataacgacgtaggccgcagcgttgacgaaacgcttcgcgtattgcaagctctgcaatccggcggtttgtgcccaatgaactggaaaccaggtcaacaaaatctggttgcgaaataa

SEQ ID NO: 10974 - protein, 182 aa, Paenibacillus sp. JDR-2
MAERLVGRPAPDFKMDTATGDGKDFGTASLADYKGKWLVLFFYPLDFTFVCPTEITALSLASEQFKALNTEVLGVSVDSKHSHRAWINTPVNDNGLGELNFPLAADITKSVARDYGVLIEEEGVALRGLYIIDPEGEVKYQVVNHNDVGRSVDETLRVLQALQSGGLCPMNWKPGQQNLVAK

SEQ ID NO: 10975 - DNA, 600 bp, Cyanothece sp. PCC 8801
  CDS (1)..(600): transl_table=11
atgacaacacaaggatgcttgcgagtgggtcaactcgcaccagatttcaccgcgacagcagtcattgatcaggaatttcagaccaagaaactctctggctatcgtggcaaatatgttgtcttattcttctatcccttagactttacctttgtttgccccacagaaattaccgcttttagcgatcgctacgaagaattcaccaaaatcaacacagaagtcctcggtgtatcggtcgatagtgaattttctcacctagcttggattcaaaccgatcgcaaagaagggggagtcggtgatgttgcgtacccactggtatctgatattaaaagagaaatcagcatagcttacaatgtcttagatcccgatgcgggtgttgccctacgaggactctttattatcgataaagaaggatatatccaacattctaccatcaataacctttcctttggtcgtagcgttgatgaaaccctacggacactcaaagctattcaatacgtccaaagccaccccgatgaagtttgtcctgcgggttgggaagaaggcgatagaaccatgatccccgatcccgttaaagccaaagtttacttctccgcgatttag

SEQ ID NO: 10976 - protein, 199 aa, Cyanothece sp. PCC 8801
MTTQGCLRVGQLAPDFTATAVIDQEFQTKKLSGYRGKYVVLFFYPLDFTFVCPTEITAFSDRYEEFTKINTEVLGVSVDSEFSHLAWIQTDRKEGGVGDVAYPLVSDIKREISIAYNVLDPDAGVALRGLFIIDKEGYIQHSTINNLSFGRSVDETLRTLKAIQYVQSHPDEVCPAGWEEGDRTMIPDPVKAKVYFSAI

SEQ ID NO: 10977 - DNA, 594 bp, Cyanothece sp. PCC 7424
  CDS (1)..(594): transl_table=11
atggaaggttgtttaagagtaggtcaaaacgcgcccgactttaccgcaacagccgttgttgatcaagagttcaagacaatcaaactgtctgactatcgtggcaagtacgtagtcttattcttttatcctttagactttactttcgtttgccctacagaaattattgcctttagcgatcgctatgaagagttcaaaaagattaatacagaagttttaggggtatctgtagacagcgaattttctcacctagcttggattcaaaccgatcgtaaaagtggtggaattggagacattgcctatcctctcgtctccgatatcaaaaaagaaatcagcactgcttacaatgtattagatcccgaagccggggttgcattgcgcggattattcatcattgacaaagaaggtgtgattcaacactctaccattaataatctctcctttggtcgtagtgtagatgaaactctacgcaccctcaaagcgattcaatatgttcaaactcaccccgatgaagtttgtccggctggatggcaagaaggagataaaaccatgaatcctgatcctgtaaaagctaaagtttactttgcttctgtataa

SEQ ID NO: 10978 - protein, 197 aa, Cyanothece sp. PCC 7424
MEGCLRVGQNAPDFTATAVVDQEFKTIKLSDYRGKYVVLFFYPLDFTFVCPTEIIAFSDRYEEFKKINTEVLGVSVDSEFSHLAWIQTDRKSGGIGDIAYPLVSDIKKEISTAYNVLDPEAGVALRGLFIIDKEGVIQHSTINNLSFGRSVDETLRTLKAIQYVQTHPDEVCPAGWQEGDKTMNPDPVKAKVYFASV

SEQ ID NO: 10979 - DNA, 603 bp, Geobacter sp. M21
  CDS (1)..(603): transl_table=11
atgagtcttacaaccttggttactaaggaagccccggattttacagcacaggcggtgctgcctgacaactcgttcgccgagctcaccctctcgaagtatcgtggcaagtacgtggtgctctttttctatccgctcgacttcaccttcgtctgcccctccgagatcctcgctttcgacaagagggtggcggatttcaaggcgaagaattgcgaggtgatcggcgtatccgtcgattccaggttcacccacctcgcttggaagaacacctcggtggaaaacggcggcatcggcaatgtccagtatccgctggtcgaggacctggacaagtcgatcgcgaggtcctacgggatcctgttaaacgaatcggtcgccctgcgcgggcttttcctgatcgacaccaagggggtgatccgccactccgtcatcaacgacctccccttgggcagaagcgtcggcgaggcgctcaggatgctggatgcgctgcagttcgtggaaacccacggcggcgaggtctgcccggcaaactggcaggaaggcgaggagtcgatgaaggcttccaccgaaggggttgccgagtacctcaagaaaaagcacggcaagtaa

SEQ ID NO: 10980 - protein, 200 aa, Geobacter sp. M21
MSLTTLVTKEAPDFTAQAVLPDNSFAELTLSKYRGKYVVLFFYPLDFTFVCPSEILAFDKRVADFKAKNCEVIGVSVDSRFTHLAWKNTSVENGGIGNVQYPLVEDLDKSIARSYGILLNESVALRGLFLIDTKGVIRHSVINDLPLGRSVGEALRMLDALQFVETHGGEVCPANWQEGEESMKASTEGVAEYLKKKHGK

SEQ ID NO: 10981 - DNA, 630 bp, Geobacter sp. M21
  CDS (1)..(630): transl_table=11
atgagattaacaagtttcacactgttggcggcactggctgtatcaattatcatcaccccttttacctcggccgcggcggagttgacgcaacaggtggcgaaggtcggggaacccgctcccgatttcaccctggatgcctgggtcgggaccgtccccggcaaggaattcaagcagataaacctgaaagagctgcgcggcaagtgggtcgtgctcttcttctatcccatggacttcaccttcgtctgtcccaccgagatcaaggggttcaacgacgccctggctcagttcgaaaagctggacgccgtggtcctgggcgcctccaccgacagcaagttcgcccacctggcctgggtcaagcgcggcgacctgggttccctcaggtacccgctgctctcggacatcaagaaggagaccgcgaggaagtacggctgcctggacgagaaggccggagttgcgctgcgtgcgctttacatcatcgacccgcagggagtgctgcagtaccaggtggtgcacaacctcgatgtggggaggagcgtggatgagacgctgcgcgtgctggaggcgctgcagaccggctcgctctgcccgataggctggaagcccggccagaaaaccctcggaaaaccttga

SEQ ID NO: 10982 - protein, 209 aa, Geobacter sp. M21
MRLTSFTLLAALAVSIIITPFTSAAAELTQQVAKVGEPAPDFTLDAWVGTVPGKEFKQINLKELRGKWVVLFFYPMDFTFVCPTEIKGFNDALAQFEKLDAVVLGASTDSKFAHLAWVKRGDLGSLRYPLLSDIKKETARKYGCLDEKAGVALRALYIIDPQGVLQYQVVHNLDVGRSVDETLRVLEALQTGSLCPIGWKPGQKTLGKP

SEQ ID NO: 10983 - DNA, 597 bp, Cyanothece sp. PCC 7425
  CDS (1)..(597): transl_table=11
atgacccattatgagtgtctgcgggttggccagcctgcccctgactttaccgccacagcagtattcgatcaagagtttaaaaccatcaagctctctgactaccgcggtaaatacgttgtactgttcttctatccgctggactttaccttcgtttgtccgactgagattaccgccttcagcgatcgctacagtgaattcagcagcattaacacggaaattctgggcgtatcagtagatagcgaattttctcacctggcctggacccagaccgatcgcaaatctgggggtgtgggtgacctgaactatcccctggtctcggatattaagaaggaaatcagtgcagcctacaacgtattaaccgaaggcggcatttccttgcgcggtctctttattatcgacaaggatggagtgatccagcacgccacgatcaacaacctggcctttggtcggagtgtggatgaaaccctgcgtaccctgcaagccattcagtacgttcagtctcaccctgatgaagtttgcccggccggttggaaacccggtgaaaagacgatgaaccctgatccggttaaatccaaggtctacttttcagccgtttaa

SEQ ID NO: 10984 - protein, 198 aa, Cyanothece sp. PCC 7425
MTHYECLRVGQPAPDFTATAVFDQEFKTIKLSDYRGKYVVLFFYPLDFTFVCPTEITAFSDRYSEFSSINTEILGVSVDSEFSHLAWTQTDRKSGGVGDLNYPLVSDIKKEISAAYNVLTEGGISLRGLFIIDKDGVIQHATINNLAFGRSVDETLRTLQAIQYVQSHPDEVCPAGWKPGEKTMNPDPVKSKVYFSAV

SEQ ID NO: 10985 - DNA, 594 bp, Cyanothece sp. PCC 7822
  CDS (1)..(594): transl_table=11
atggcagagagcctaagagtaggtcaaagtgcgcccgactttactgcgacagccgttatcgatcaagagttcaagaccatcaaactgtctgagtatcgtggtaagtacgtggttttattcttttatcccttagactttacctttgtttgccctacagaaattattgcatttagtgatcgctatgatgaattcaaaaacatcaacacagaagttttaggggtatctgtagacagcgaattttcacacctagcctggattcaaactgagcgcaaagatggtggaattggagatattgtttaccccatcgtttccgatatcaagaaggaaattagtaccgcttacaatgtattagatcctgaagcgggtgttgccctgcgcggattatttatcattgacaaagaaggtgtgattcaacacgctaccattaacaacctctcttttggtcgtagtgtagatgaaactttacgcacactcaaagcgattcaatatgttcaaagtcatcccgatgaagtttgtccggctggatggcaagaaggcgataagactatgattcccgatcctgaaaaagcgaaaatttattttgcctctgtttaa

SEQ ID NO: 10986 - protein, 197 aa, Cyanothece sp. PCC 7822
MAESLRVGQSAPDFTATAVIDQEFKTIKLSEYRGKYVVLFFYPLDFTFVCPTEIIAFSDRYDEFKNINTEVLGVSVDSEFSHLAWIQTERKDGGIGDIVYPIVSDIKKEISTAYNVLDPEAGVALRGLFIIDKEGVIQHATINNLSFGRSVDETLRTLKAIQYVQSHPDEVCPAGWQEGDKTMIPDPEKAKIYFASV

SEQ ID NO: 10987 - DNA, 597 bp, Arthrospira maxima CS-328
  CDS (1)..(597): transl_table=11
atgacaagtgagtgtattcgcgttggtttagcagccccggattttaccgccacagcggttattgaccaagagttcaaaactattaagttatctgaatatcggggtaaatacgttgttctgttcttttatcccctggactttacttttgtctgtccgacagaaattaccgcatttagcgatcgcgctgaagaattttcagccattaacacccaaatcttaggggtttctgtcgatagcgaattttctcacctagcttggattcaaagcgatcgccagtccggtggagttggcgacctcaactatcccctagtgtctgacattaaaaaagaaatcagcgccgcctacaatgtgcttgacccagaagccggaattgcactgcggggtctgttcattattgacaaagatggcattattcaacacgccactatcaataacctcgccttcggtcgtaatgtagacgaaaccctacggaccttacaagcgatccaatatgtgcaagctaaccccggcgaagtttgtcccgcaggttggaagccaggagataaaaccatgaaccccgacccagttaagtctaaagagttcttcgcagctatctaa

SEQ ID NO: 10988 - protein, 198 aa, Arthrospira maxima CS-328
MTSECIRVGLAAPDFTATAVIDQEFKTIKLSEYRGKYVVLFFYPLDFTFVCPTEITAFSDRAEEFSAINTQILGVSVDSEFSHLAWIQSDRQSGGVGDLNYPLVSDIKKEISAAYNVLDPEAGIALRGLFIIDKDGIIQHATINNLAFGRNVDETLRTLQAIQYVQANPGEVCPAGWKPGDKTMNPDPVKSKEFFAAI

SEQ ID NO: 10989 - DNA, 645 bp, Taiwanofungus camphoratus
  CDS (1)..(645)
atggtcgccatcgtccagaaacctgcgcccggattcaaggccatggccgtcgttgatggtcagttccaggatatttctctatctgactacttcggacaatgggtggttctcttcttctatccccttgacttcactttcgtatgcccaactgaaatccttgccttcaatgacgcccttcctcaattcaaggagctgagcactactgtcctcagcgtctcaactgattcacactacgcgcatttggcatgggccacgcaagaccgcaagcagggtggtcttggtccgaacctcaagctccccatgattgcggataagaacacgcagatctcacgcgactacggggttttgatcgaggaagagggtgttgctcttcgcggtctcttcttgattgaccccaagggtaccctgaggcaaatcacaatcaacgatttaccagtcggtcgctctgtcgatgagaccattcgtctgatcaaggcgttccagttcactgacgaacatggtgaggtttgccctgccaactggacagaaggcggcaagacgatcaaagctgatcccaagggttcattggagtatttttccacagcgggtgcaaatggtcatacagacgctaaagggactaccaagaagcgtgctcgcgttgactga

SEQ ID NO: 10990 - protein, 214 aa, Taiwanofungus camphoratus
MVAIVQKPAPGFKAMAVVDGQFQDISLSDYFGQWVVLFFYPLDFTFVCPTEILAFNDALPQFKELSTTVLSVSTDSHYAHLAWATQDRKQGGLGPNLKLPMIADKNTQISRDYGVLIEEEGVALRGLFLIDPKGTLRQITINDLPVGRSVDETIRLIKAFQFTDEHGEVCPANWTEGGKTIKADPKGSLEYFSTAGANGHTDAKGTTKKRARVD

SEQ ID NO: 10991 - DNA, 636 bp, Crinipellis perniciosa
  CDS (1)..(636)
atggtcgctctcgttcaacgtcctgcaccaggcttcaaggccacagctgtcatcgaaggtctcttccaggaagtttctttgtcggattacttgggcaaatgggttgtccttttcttctacccaatggatttcacctttgtttgccctactgaaatcctcgccttcaacgatgccttggcagaattccaaaacctcgagaccgttgttctcggtgtctcgaccgattctcaatactcccactttgcttgggcgaaccagccccgtaaggaaggaggtctcggccctaacctcaagctccctttgattgctgaccgcagcatgtccatctctcgcgactatggcgttcttcttgaagagcaaggtatcgctcttcgtggtctcttcatcatcgacccaaagggaaccctcaggcaaatcactatcaatgatcttcctgtcggtcgctccgttgaagagaccattcgtctcgtcaaggccttccaattcaccgataagcacggtgaagtttgtcctgccaactggtccgaaggtggcaagaccatcaaggcggaccccaagtcatccctcgaatacttcggcagtgctggtgatgatgcttctctcggttcagctaaaaagcgcccacgtactgagtaa

SEQ ID NO: 10992 - protein, 211 aa, Crinipellis perniciosa
MVALVQRPAPGFKATAVIEGLFQEVSLSDYLGKWVVLFFYPMDFTFVCPTEILAFNDALAEFQNLETVVLGVSTDSQYSHFAWANQPRKEGGLGPNLKLPLIADRSMSISRDYGVLLEEQGIALRGLFIIDPKGTLRQITINDLPVGRSVEETIRLVKAFQFTDKHGEVCPANWSEGGKTIKADPKSSLEYFGSAGDDASLGSAKKRPRTE

SEQ ID NO: 10993 - DNA, 621 bp, Magnetospirillum gryphiswaldense
  CDS (1)..(621): transl_table=11
atgtccgatgccgtcaatcccctgagcctggtgaccaccgccgcccctgacttcaccgccccggcggtgatgcccgacaattccatcaacgaatccttcaacctgaagtcctatctggccggttcctacggcttggtgttcttctatccgctggatttcaccttcgtctgcccgtcggaaatcctggcccatgaccaccgcgtcaaggccctggcggaaaagaactgcaaggtcgtcgccgtgtcggtggattcgcacttcacccacctggcctggaagaataccgccatcgacaagggcggcctgggcaatgtccagttccccatggtcgccgatttgaccaagtccatcgccaagtcctacggcgtgctgatcaacgacgccgtcgccctgcgcggttcgttcctgatcgacaaggccggcaacgtccaggtcgcccatgtcaacaacctgcccctgggccgcaatgtcgacgaaatgctgcgtctggtcgacgccctgcagttccacgaggaacatggcgaggtctgccccgccggttggcagaagggcaaggccggcatgaccgccagcccggatggcgtcgccaagtacctggccgcccacgccaccgagctgtaa

SEQ ID NO: 10994 - protein, 206 aa, Magnetospirillum gryphiswaldense
MSDAVNPLSLVTTAAPDFTAPAVMPDNSINESFNLKSYLAGSYGLVFFYPLDFTFVCPSEILAHDHRVKALAEKNCKVVAVSVDSHFTHLAWKNTAIDKGGLGNVQFPMVADLTKSIAKSYGVLINDAVALRGSFLIDKAGNVQVAHVNNLPLGRNVDEMLRLVDALQFHEEHGEVCPAGWQKGKAGMTASPDGVAKYLAAHATEL

SEQ ID NO: 10995 - DNA, 822 bp, Vitis vinifera
  CDS (1)..(822)
  misc_feature (31)..(31): r is g or a
  misc_feature (202)..(202): k is g or t
atggcctgctcggctccttcaacccccaccrctctcctctcttccaaccccagggcttttccttccaaatccctatccaccgtggcttcattttccaagcccctctctccccaaaccctaaccatccccaattccttcaatcctctgcgcaagccctttcaatctccggtcccccgctccatttcctcccgtggctctcackccagacgtagcctcgttgtcagggctagtgaagctccactggttgggaataaggcaccggattttgaggcagaagctgtttttgatcaggagttcatcaaggttacactttcagagtatattgggaagaaatatgtgattctctttttctacccactggacttcacatttgtttgtcctacagagatcactgctttcagtgaccgctatgaagagtttgagaagttaaacacagaaatattgggtgtttctattgacagtgtgttctcgcaccttgcatgggtccaaacagatagaaagtcaggtggccttggtgatctcaagtatcccctggtctctgatgtcactaagtcaatttcaaaatcttatgatgtgctgattccagatcagggagttgcactcagggggcttttcattattgacaaggaaggaattattcagcacgccactatcaacaatcttgccattgggcggagcgtcgatgagacaatgagaacactccaggcattacagtatgtgcaagagaacccagatgaagtttgcccagctgggtggaagcctggagagaagtccatgaagccagatcccaagctcagcaaggaatattttgcagcaatataa

SEQ ID NO: 10996 - protein, 273 aa, Vitis vinifera
  misc_feature (11)..(11): The Xaa at location 11 stands for Ala, or Thr.
  misc_feature (68)..(68): The Xaa at location 68 stands for Ala, or Ser.
MACSAPSTPTXLLSSNPRAFPSKSLSTVASFSKPLSPQTLTIPNSFNPLRKPFQSPVPRSISSRGSHXRRSLVVRASEAPLVGNKAPDFEAEAVFDQEFIKVTLSEYIGKKYVILFFYPLDFTFVCPTEITAFSDRYEEFEKLNTEILGVSIDSVFSHLAWVQTDRKSGGLGDLKYPLVSDVTKSISKSYDVLIPDQGVALRGLFIIDKEGIIQHATINNLAIGRSVDETMRTLQALQYVQENPDEVCPAGWKPGEKSMKPDPKLSKEYFAAI

SEQ ID NO: 10997 - DNA, 822 bp, Vitis vinifera
  CDS (1)..(822)
atggcctgctcggctccttcaacccccaccactctcctctcttccaaccccagggcttttccttccaaatccctatccaccgtggcttcattttccaagcccctctctccccaaaccctaaccatccccaattccttcaatcctctgcgcaagccctttcaatctccggtcccccgctccatttcctcccgtggctctcactccagacgtagcctcgttgtcagggctagtgaagctccactggttgggaataaggcaccggattttgaggcagaagctgtttttgatcaggagttcatcaaggttacactttcagagtatattgggaagaaatatgtgattctctttttctacccactggacttcacatttgtttgtcctacagagatcactgctttcagtgaccgctatgaagagtttgagaagttaaacacagaaatattgggtgtttctattgacagtgtgttctcgcaccttgcatgggtccaaacagatagaaagtcaggtggccttggtgatctcaagtatcccctggtctctgatgtcactaagtcaatttcaaaatcttatgatgtgctgattccagatcagggagttgcactcagggggcttttcattattgacaaggaaggaattattcagcacgccactatcaacaatcttgccattgggcggagcgtcgatgagacaatgagaacactccaggcattacagtatgtgcaagagaacccagatgaagtttgcccagctgggtggaagcctggagagaagtccatgaagccagatcccaagctcagcaaggaatattttgcagcaatataa

SEQ ID NO: 10998 - protein, 273 aa, Vitis vinifera
MACSAPSTPTTLLSSNPRAFPSKSLSTVASFSKPLSPQTLTIPNSFNPLRKPFQSPVPRSISSRGSHSRRSLVVRASEAPLVGNKAPDFEAEAVFDQEFIKVTLSEYIGKKYVILFFYPLDFTFVCPTEITAFSDRYEEFEKLNTEILGVSIDSVFSHLAWVQTDRKSGGLGDLKYPLVSDVTKSISKSYDVLIPDQGVALRGLFIIDKEGIIQHATINNLAIGRSVDETMRTLQALQYVQENPDEVCPAGWKPGEKSMKPDPKLSKEYFAAI

SEQ ID NO: 10999 - DNA, 600 bp, Microcystis aeruginosa PCC 7806
  CDS (1)..(600): transl_table=11
atgaccgccgaaggttgcttaagagtcggacaagcggcgccggatttcaccgcgaccgccgttttcgatcaagagttcaaaaccatcaaattatcggattatcggggtaaatacgtcgttttattcttctatcccctcgattttacctttgtttgccccacggaaattaccgctttcagcgatcgagttagcgaatttagcagtatcaacacccaaattttaggggtgtccgtcgatagcgaatttgctcacctcgcatggattcaaaccgagagaaaatccggcggtgtgggggatgtggcctatcctttggtgtcggatctgaaaaaagaaatcagcaccgcttacaatgttcttgatcctgatgcgggggtatccctgcgtggtctctttatcatcgataaagaaggtgttatccaacacgctactattaataatctttcctttggtcgcagtgtcgatgaaaccctccgcactctgaaagcgattcaatacgtccaatcccatccggatgaagtttgtcccgccggttggcaagaaggggatgctactatggttcccgatcctgtgaagtcaaaagtttacttcgcagcagtttag

SEQ ID NO: 11000 - protein, 199 aa, Microcystis aeruginosa PCC 7806
MTAEGCLRVGQAAPDFTATAVFDQEFKTIKLSDYRGKYVVLFFYPLDFTFVCPTEITAFSDRVSEFSSINTQILGVSVDSEFAHLAWIQTERKSGGVGDVAYPLVSDLKKEISTAYNVLDPDAGVSLRGLFIIDKEGVIQHATINNLSFGRSVDETLRTLKAIQYVQSHPDEVCPAGWQEGDATMVPDPVKSKVYFAAV

SEQ ID NO: 11001 - DNA, 849 bp, Picea sitchensis
  CDS (1)..(849)
atggcctctgcaacatctccatttttcccgttactggtatcttctacccacgagagggtgaaggcaggttgttcatcgtcaggcaggtggagggcacccaagggggctttagaaggcctgaggagggtacccaaggggggttttgaaggcctgggcaaggccttcagtaaccgattggcaggtcctcggaccgctgctgcctgcacctctaacagtaaaagcagcaacttagggaggaggctggtcgtcaatgccggtgaactgccattagttggaaacaaggcacctgattttgaagcagaggctgtttttgatcaagagttcatcaaggtcaagctgtctgaatacatcggaaaaaaatatgttattctttttttctatcctttggacttcacttttgtctgccccacagaaatcactgctttcagtgacagacattccgagtttgagaagttgaacacagaaattcttggtgtttccattgatagtgtgttctctcaccttgcttgggttcaaactgataggaaagctggcggtcttggtgatttgaaatatcctcttatatctgatgttacaaagggtatttcaaaagcctacaatgttttgattgcagatcagggaatagcattacgaggactttttattattgacaaggagggtgtgattcaacactccacaatcaataatctagccattggtcggagtgtggatgaaacgttgcgtaccttacaggctcttcaatatgttcaggataaccccgatgaagtatgcccagctgggtggaagccaggagacaaatcaatgaagccagaccccaagttgagtaaagaatactttgaagctatctga

SEQ ID NO: 11002 - protein, 282 aa, Picea sitchensis
MASATSPFFPLLVSSTHERVKAGCSSSGRWRAPKGALEGLRRVPKGGFEGLGKAFSNRLAGPRTAAACTSNSKSSNLGRRLVVNAGELPLVGNKAPDFEAEAVFDQEFIKVKLSEYIGKKYVILFFYPLDFTFVCPTEITAFSDRHSEFEKLNTEILGVSIDSVFSHLAWVQTDRKAGGLGDLKYPLISDVTKGISKAYNVLIADQGIALRGLFIIDKEGVIQHSTINNLAIGRSVDETLRTLQALQYVQDNPDEVCPAGWKPGDKSMKPDPKLSKEYFEAI

SEQ ID NO: 11003 - DNA, 591 bp, Saccharomyces cerevisiae (strain RM11-1a)
  CDS (1)..(591)
atggtagcagaagttcaaaaacaagccccaccatttaagaaaaccgccgtagtcgacggtatcttcgaggaaatttcactggaaaagtataaaggtaagtacgttgttctagcttttgtcccattggctttttcatttgtctgtccaactgagattgttgcgttttccgatgccgccaagaaattcgaagatcagggcgcccaagttttatttgcctccaccgactctgaatattccttactggcatggaccaaccttcccagaaaagacggtggattaggtccagttaaagttcctttgcttgctgataagaatcattccttatccagagactatggcgttttgattgaaaaagaaggtatagctttaagaggtttgttcataatcgacccgaagggaatcattagacatatcactatcaatgatttatctgttggcagaaacgtcaatgaagctttgagattagtcgaaggtttccagtggactgacaaaaatggtacagttttgccatgcaactggaccccaggagccaccaccatcaaacctgacgttaaagattccaaggagtatttcaaaagtgccaataattaa

SEQ ID NO: 11004 - protein, 196 aa, Saccharomyces cerevisiae (strain RM11-1a)
MVAEVQKQAPPFKKTAVVDGIFEEISLEKYKGKYVVLAFVPLAFSFVCPTEIVAFSDAAKKFEDQGAQVLFASTDSEYSLLAWTNLPRKDGGLGPVKVPLLADKNHSLSRDYGVLIEKEGIALRGLFIIDPKGIIRHITINDLSVGRNVNEALRLVEGFQWTDKNGTVLPCNWTPGATTIKPDVKDSKEYFKSANN

SEQ ID NO: 11005 - DNA, 867 bp, Elaeis guineensis var. tenera
  CDS (1)..(867)
atggcttgctccgttccttccattgtctcctcgaaccctagggttttcccttccaagcccttgactcccacagcgtctttgcctcccgccccggggcttctctccaaaaccctagccgtcccgaagagcttccacggcctccggaagagcttccaccctcgctccgctccgatggtctcttctcctagatcctcccgaagaagcttcgtcgtgaatgccgtcagcgggagtgagctgccgctggttggaaatcgagcaccagattttgaggctgaagcagtctttgatcaggagttcatcaatgtgaaactctctgattatattgggaagaagtatgtgattttgtttttctacccactggattttacatttgtttgccccactgagataactgctttcagtgatcggtactcagaatttgagcagctgaatacagaaatattgggtgtttcaatcgacagtgtgttctcccatcttgcatgggttcaaacagacaggaagtcagggggacttggtgatctgaagtatccgttgatttctgatgttaccaagtcaatttcaaaatcttttggagttttgattcctgatcagggaattgcattgcgaggactgttcatcattgacaaggaaggagtgattcagcattgtactattaacaaccttgccattggacggagtgttgatgaaaccatgaggacccttcaggcgttgcaatatgtccaagataacccagatgaggtctgccctgccggatggaagcctggggagaagtctatgaagccagaccctaaactcagcaaggaatacttcgcagctatatcagggctgttccattttgctactgctatattgttgtgccatctttag

SEQ ID NO: 11006 - protein, 288 aa, Elaeis guineensis var. tenera
MACSVPSIVSSNPRVFPSKPLTPTASLPPAPGLLSKTLAVPKSFHGLRKSFHPRSAPMVSSPRSSRRSFVVNAVSGSELPLVGNRAPDFEAEAVFDQEFINVKLSDYIGKKYVILFFYPLDFTFVCPTEITAFSDRYSEFEQLNTEILGVSIDSVFSHLAWVQTDRKSGGLGDLKYPLISDVTKSISKSFGVLIPDQGIALRGLFIIDKEGVIQHCTINNLAIGRSVDETMRTLQALQYVQDNPDEVCPAGWKPGEKSMKPDPKLSKEYFAAISGLFHFATAILLCHL

SEQ ID NO: 11007 - DNA, 594 bp, Microcoleus chthonoplastes PCC 7420
  CDS (1)..(594): transl_table=11
atggaaggatgtctgcgagttggtcaacctgctcctgacttcaacgcgacggcggtcatcgatcaagaatttaagaccatcaaactgtccgactaccggggtcaatatgtagtcatattcttctatccactagacttcacctttgtctgtcccacagagattacagcatttagcgatcgctttagtgaatttaaagaagttgggactcaagttctcggcatctccgtggacagtgaattctctcacctcgcttggattcaaaccgatcgcaagagtggtggtgtgggtgatctcaattatcctctagtttctgacatcaagaaagaaatcagtaccgcttataacgttcttgaccccgatgcaggtgtagccctacggggattgtttattatcgacaaagatggtatcattcagcaatcgaccatcaacaacctctcttttggtcggaatgtagatgaagtgttgcggactctgaaagcgattcaatacgttcaagcgcatccagacgaagtttgccctcaaggttggcaacccggtgataaaacaatggttcccgatcccgttaaatctaaggtttacttctcagccgtttaa

SEQ ID NO: 11008 - protein, 197 aa, Microcoleus chthonoplastes PCC 7420
MEGCLRVGQPAPDFNATAVIDQEFKTIKLSDYRGQYVVIFFYPLDFTFVCPTEITAFSDRFSEFKEVGTQVLGISVDSEFSHLAWIQTDRKSGGVGDLNYPLVSDIKKEISTAYNVLDPDAGVALRGLFIIDKDGIIQQSTINNLSFGRNVDEVLRTLKAIQYVQAHPDEVCPQGWQPGDKTMVPDPVKSKVYFSAV

SEQ ID NO: 11009 - DNA, 600 bp, Synechococcus sp. PCC 7335
  CDS (1)..(600): transl_table=11
atgagtgagcaaggatgtcttagagtaggtcaagttgctccagacttcacggctactgctgtggtcgatcaagagtttaagacaatcaagctgtccgactatcgtggtaagtacgtcgttctttttttctatcctttagattttacgtttgtgtgtcctacggaaatcactgcgttcagtgatggctatgatagcttcaaggatatcaaaacagaagtgctaggcgtttctatcgatagcgaattctcccatcttgcatggattcagacagatcgaaagatgggtggcgttggcgatcttaactacccgctggtttcagatatcaagaaggaaattagctcagcctataacgtgcttgatacagaagtaggcgtagctctacgcggcctatttattatcgatagagaaggcatcgtacaacatgccacaattaacaacctttcctttggccgcagtgttgacgaaacgctgcgtgtacttcaggcggttcagcatgttcagtctcatcctgatgaagtttgtccggctggctggcaacctggcgattcgacaatgattcccgatccggtgaaatcgagagagttttttgcagctgtataa

SEQ ID NO: 11010 - protein, 199 aa, Synechococcus sp. PCC 7335
MSEQGCLRVGQVAPDFTATAVVDQEFKTIKLSDYRGKYVVLFFYPLDFTFVCPTEITAFSDGYDSFKDIKTEVLGVSIDSEFSHLAWIQTDRKMGGVGDLNYPLVSDIKKEISSAYNVLDTEVGVALRGLFIIDREGIVQHATINNLSFGRSVDETLRVLQAVQHVQSHPDEVCPAGWQPGDSTMIPDPVKSREFFAAV

SEQ ID NO: 11011 - DNA, 783 bp, Zea mays
  CDS (1)..(783)
atggcctgctccttcgccgccgcgaccgtcgtctcttccgcccccaccccggccgccaggcccctcgccgctgccccgcagtccgtctctgtttcccgctccgcggtcgccaccgccgccaggccgctccgcctcgtcgcctccagatccgcgcgggccatcagactcgtcgcccgcgccggcggcgtcgatgacttgccgctggtcgggaacaaggcgccagacttcgaagccgaggccgtgttcgaccaagagttcatcaacgtgaagctctctgattacatcgggaagaaatacgtcgttctgttcttctaccccttggatttcacctttgtctgcccgaccgagattactgccttcagtgacagatatgaggaattcgagaagttgaacactgaggttcttggtgtctctattgacagtgtgttctcccaccttgcatgggtgcagacagacaggaagtctggtgggcttggcgatcttaaatacccacttatttctgatgtcaccaaatcaatttcaaaggccttcggtgttctgatccctgaccagggtatcgctctgagaggactgttcatcattgacaaggagggagtgattcagcactctaccattaataaccttgccattggtcgcagtgtggacgagaccatgaggacccttcaggcattgcagtacgtccaggagaacccagacgaggtctgcccggccggttggaagccaggggagaggtccatgaagcccgaccccaagggaagcaaagagtacttcgcggccgtctag

SEQ ID NO: 11012 - protein, 260 aa, Zea mays
MACSFAAATVVSSAPTPAARPLAAAPQSVSVSRSAVATAARPLRLVASRSARAIRLVARAGGVDDLPLVGNKAPDFEAEAVFDQEFINVKLSDYIGKKYVVLFFYPLDFTFVCPTEITAFSDRYEEFEKLNTEVLGVSIDSVFSHLAWVQTDRKSGGLGDLKYPLISDVTKSISKAFGVLIPDQGIALRGLFIIDKEGVIQHSTINNLAIGRSVDETMRTLQALQYVQENPDEVCPAGWKPGERSMKPDPKGSKEYFAAV

SEQ ID NO: 11013 - DNA, 876 bp, Ixodes scapularis
  CDS (1)..(876)
atgcagtcgtcgctcgactcgtctgaagagctctcgctgtcatcgctgtcgagcacctcatacactctcgacggcgggggctccctcctgtacgccaagacttcgatgagcgttgctggtatggcgtccctaaggagtgcggcagtctgttttctagcgattcttttcactgtaattaacttatttagtacagtcagtttggaggaagcatgccattcgtttgggggaggtcaggtctacccacaagaattcacgaaagcttctgggcacaacattcactggagcaaggctcagatctccaaacctgctcccgacttcacgggcactgctgtggtggatggagagttcaaagagttcaagctatctgattttaaaggaaaatacctggtgtttttcttctatccattggacttcacatttgtttgtccaactgagatcatagccttcagcgaccgtgtgaaggagttcaaggcactcaacgctgaagtgatcgcgtgctcagtcgattccccatttacgcaccttgcatggattaacaccccgaggaagcaaggaggtctgggtccaatcaagatccctctgttgtctgaccttacacaccagatctcaaaggattacggtgtctacctcgaagatttaggacattcactcaggggactgttcatcattgacgacaagggcaagctgcgtcagatcaccatgaacgacctgcccgtgggccgctcggtggacgagaccctccgcctggtccaggcattccagtacacggacaagcacggcgaagtatgtccggccggctggaagccagggggtgacacgatcatcccgaatccagaggacaagctcaagtacttcagcaaggtggacgagctctag

SEQ ID NO: 11014 - protein, 291 aa, Ixodes scapularis
MQSSLDSSEELSLSSLSSTSYTLDGGGSLLYAKTSMSVAGMASLRSAAVCFLAILFTVINLFSTVSLEEACHSFGGGQVYPQEFTKASGHNIHWSKAQISKPAPDFTGTAVVDGEFKEFKLSDFKGKYLVFFFYPLDFTFVCPTEIIAFSDRVKEFKALNAEVIACSVDSPFTHLAWINTPRKQGGLGPIKIPLLSDLTHQISKDYGVYLEDLGHSLRGLFIIDDKGKLRQITMNDLPVGRSVDETLRLVQAFQYTDKHGEVCPAGWKPGGDTIIPNPEDKLKYFSKVDEL

SEQ ID NO: 11015 - DNA, 801 bp, Ricinus communis
  CDS (1)..(801)
atggcgtattctgctgcttcaacaacaggtctaatatcttcgattgcagccaccaccaaatcaatggcaactcctatctcaaaaccctctcaaaccctaactacatcctttttcggccaccgcaagcctctccagtcacgcgctcctcgttctatttcacttaatcgtgtctctcattcgagaaagagcttcgtcgttaaagctagtagcgagcttccacttgttggaaataaagcaccagatttcgaggctgaggctgtttttgatcaggagttcattaatgttaaactttctgactatattgggaagaaatacgtgattctatttttctatccattggacttcacatttgtttgccctacagagattactgctttcagtgaccgttatgctgagtttgagaaaataaacactgaagtgttgggtgtttcaattgacagtgtgttctcccaccttgcttgggttcaaactgatagaaagtccggtggtcttggagatttgaaatatccgctaatatcagatgtcactaaatcaatttcaaaatcgtatggggtgctaatccctgatcagggagttgctttgagaggacttttcattattgataaggaaggagtaatccaacactctaccatcaacaatcttgcaattgggcgcagtgttgatgagacactacgaaccctgcaggcattgcaatacgtccaggaaaatccagatgaagtttgcccagcagggtggaagcctggggagaagtccatgaagccagacccaaagctgagcaaggagtactttgcggccatctag

SEQ ID NO: 11016 - protein, 266 aa, Ricinus communis
MAYSAASTTGLISSIAATTKSMATPISKPSQTLTTSFFGHRKPLQSRAPRSISLNRVSHSRKSFVVKASSELPLVGNKAPDFEAEAVFDQEFINVKLSDYIGKKYVILFFYPLDFTFVCPTEITAFSDRYAEFEKINTEVLGVSIDSVFSHLAWVQTDRKSGGLGDLKYPLISDVTKSISKSYGVLIPDQGVALRGLFIIDKEGVIQHSTINNLAIGRSVDETLRTLQALQYVQENPDEVCPAGWKPGEKSMKPDPKLSKEYFAAI

SEQ ID NO: 11017 - DNA, 753 bp, Micromonas pusilla CCMP1545
  CDS (1)..(753)
atggcctgcatcgcttcctccacgatgaccgcgcgcgtctccgcgcgcgcgtccgccgcgtccgcgcgccgcgcgacgctctcgtccaaggcgcccgtcaaggcgcggttcgcgtcgtccgtcgcgacgaaatcctccgcgcgccgcgcgacgacgacgaccgcgtccgcggcgccgctcgtcggcaacgccgcgccggacttctccgcggaggcggtcttcgaccaggagttcatgaacgtcaacctgagcgactaccgcggcaagtacgtcgtcctcttcttctacccgctcgacttcaccttcgtgtgccccacggagatcaccgccttctccgatcgctacgaagagttcgcgaagatgaacaccgaggtcctcggcgtgtccgtggactcgcagttctcgcacctcgcgtggatccagaccgagcgcaacgccggcggcctcggcgacatcgcgtacccgctcgtctccgacctcaagaaggagatctcgtccgcgtacgacgtcctcaccgaggacggcgtcgcgctcagagggctcttcatcatcgacaaggagggcgtcgtgcagcactccaccatcaacaacctcgcgttcggccgctccgtggacgagacgctgcgcacgctgcaggcgcttcagcacgtgcaggagaaccctgatgaggtttgcccggcggggtggaagcccggcgacgtcacgatgaagccggacccggagggatccaaggagtacttcgccgccatctaa

SEQ ID NO: 11018 - protein, 250 aa, Micromonas pusilla CCMP1545
MACIASSTMTARVSARASAASARRATLSSKAPVKARFASSVATKSSARRATTTTASAAPLVGNAAPDFSAEAVFDQEFMNVNLSDYRGKYVVLFFYPLDFTFVCPTEITAFSDRYEEFAKMNTEVLGVSVDSQFSHLAWIQTERNAGGLGDIAYPLVSDLKKEISSAYDVLTEDGVALRGLFIIDKEGVVQHSTINNLAFGRSVDETLRTLQALQHVQENPDEVCPAGWKPGDVTMKPDPEGSKEYFAAI

SEQ ID NO: 11019 - DNA, 777 bp, Secale cereale
  CDS (1)..(777)
atggcgtgcgccttctccgcctccaccgtgtccacggcggccgcgctcgtcgcgtccccgaagccagccggggcgccgagtgcctgtcgtttccccgcgcttcgcaggggccgcgcaggcctccgctgcgcgcggctcgaggacgccagggcccgcagcttcgtcgcccgcgccgcagccgagtacgacctgccactggtggggaacaaagcaccggacttcgctgcggaggccgtgttcgaccaggagttcatcaacgtcaagctatctgattacattgggaagaagtatgtgattcttttcttctaccctctggacttcaccttcgtctgcccaactgagattacggctttcagcgacagacatgaggagttcgagaagataaacactgaaattcttggtgtttcagttgatagtgtgttttcccatcttgcatgggtgcagacagagaggaaatctggtggacttggtgatcttaagtatcctctggtttctgatgtcaccaaatcaatctcaaagtcttttggtgtattgatccctgatcagggaattgctctgagaggattattcatgattgacaaggagggtgtgattcagcattccactattaacaaccttggtattggccgcagtgtggatgagaccttgagaacccttcaggctctgcaatacgtccaagaaaacccagacgaggtctgcccggcaggatggaaacccggggaaaagtcgatgaagcctgaccctaagggcagcaaggagtacttcgctgccatctag

SEQ ID NO: 11020 - protein, 258 aa, Secale cereale
MACAFSASTVSTAAALVASPKPAGAPSACRFPALRRGRAGLRCARLEDARARSFVARAAAEYDLPLVGNKAPDFAAEAVFDQEFINVKLSDYIGKKYVILFFYPLDFTFVCPTEITAFSDRHEEFEKINTEILGVSVDSVFSHLAWVQTERKSGGLGDLKYPLVSDVTKSISKSFGVLIPDQGIALRGLFMIDKEGVIQHSTINNLGIGRSVDETLRTLQALQYVQENPDEVCPAGWKPGEKSMKPDPKGSKEYFAAI

SEQ ID NO: 11021 - DNA, 693 bp, Ostreococcus tauri
  CDS (1)..(693)
atgttgtccgcgagtttgtccaagagcgcgttcacgcccagggcgtcggcgctccagaagagcgttaaggggaagaacttctcccgatccgccgtccgcgtggaagcgcgcaagccgctcgtgggctacccggcgccggagtttagcgccgaggcggtgttcgatcaagagttccaagacatcaagctctcggattaccgcggcaagtacgtcgtgctcttcttctacccgctcgattttacctttgtgtgcccgacggaaatcaccgccttctccgatcgctacgaagagttcgcgaagctcaacaccgaagtcctcggcgtgagcgttgactccaagttctctcacttggcgtggttgcaaaccgaccgcaacgacggcggcctcggcgacttggcctacccgctcgtcagtgacctcaagcgcgaaatctgcgaatcgtacgatgtgttgtacgaagacggcaccgcgctccgtgggttgtacatcatcgatcgtgagggcgtcatccagcactacacatgcaacaacgctccgttcggccgcaacgtcgacgagtgcctgcgcgtgcttcaagcgatccaatacgttcaaaacaacccagacgaggtgtgcccggcgggctggaccccgggtgcggcgacgatgaagccggatccgaagggctcgaaggaatacttcaaggcgatctaa

SEQ ID NO: 11022 - protein, 230 aa, Ostreococcus tauri
MLSASLSKSAFTPRASALQKSVKGKNFSRSAVRVEARKPLVGYPAPEFSAEAVFDQEFQDIKLSDYRGKYVVLFFYPLDFTFVCPTEITAFSDRYEEFAKLNTEVLGVSVDSKFSHLAWLQTDRNDGGLGDLAYPLVSDLKREICESYDVLYEDGTALRGLYIIDREGVIQHYTCNNAPFGRNVDECLRVLQAIQYVQNNPDEVCPAGWTPGAATMKPDPKGSKEYFKAI

SEQ ID NO: 11023 - DNA, 708 bp, Chlamydomonas incerta
  CDS (1)..(708)
atggccgctctgcagtccgcttcccgctcctcggcggtggccttctcgcgccaggcgcgcgtggccccgcgcgttgcctccagcgttgctcgccgcaacctggtcgtgcgcgcttcccacgctgagaagcctctggtcggctccgtcgcccctgacttcaaggcccaggccgtgttcgaccaggagttccaggagattaccctgagcaagtaccgcggcaagtacgtggtgctgttcttctaccccctggacttcaccttcgtgtgccccaccgagatcaccgccttctcggaccgctacaaggagttcaaggacatcaacaccgaggtcctgggcgtgtccgtggacagccagttcacccacctggcctggattcagaccgaccgcaaggagggtggcctgggcgacctgaactaccccctggtggctgacctgaagaaggagatctccaaggcctacggcgtcctgaccgaggacggcatctccctgcgcggcctgttcatcatcgacaaggagggcgttgtgcagcacgccaccatcaacaacctggctttcggccgctcggtcgacgagaccaagcgtgtgctgcaggccatccagtacgtgcagtccaaccccgatgaggtctgccccgccggctggaagcccggtgacaagaccatgaagcccgaccccaagggctccaaggagtacttcgccgccgtgtaa

SEQ ID NO: 11024 - protein, 235 aa, Chlamydomonas incerta
MAALQSASRSSAVAFSRQARVAPRVASSVARRNLVVRASHAEKPLVGSVAPDFKAQAVFDQEFQEITLSKYRGKYVVLFFYPLDFTFVCPTEITAFSDRYKEFKDINTEVLGVSVDSQFTHLAWIQTDRKEGGLGDLNYPLVADLKKEISKAYGVLTEDGISLRGLFIIDKEGVVQHATINNLAFGRSVDETKRVLQAIQYVQSNPDEVCPAGWKPGDKTMKPDPKGSKEYFAAV

SEQ ID NO: 11025 - DNA, 816 bp, Arabidopsis thaliana
  CDS (1)..(816)
atggcgtctatagcttcttcttcttccaccaccctactctcttcctctagggttcttcttccttcaaagtcttctcttttatctcctaccgtctctgtccccagaaccctacactcttcctcggcatcatcctcttctctctgttccgggttctccagtctcggttccctcaccaccagccgctccgcctcacgccggaacttcgccgtcaaggctcaggctgatgatttaccactggtcggtaataaggcgcctgattttgaagcagaggcagtttttgatcaagagttcataaaggtgaagctctctgagtacattggcaaaaagtatgttattctattcttctaccctttggacttcacttttgtctgccccactgagattactgccttcagtgaccgttatgaagaatttgagaagctaaacaccgaagtattaggggtctctgtcgacagtgtgttctcgcatctcgcgtgggtccaaacagacagaaagtcgggagggctcggtgatctgaattatcctcttgtttcggatatcactaaatccatttcaaaatcgtttggagtgctcatccctgatcagggcattgcactgagagggcttttcatcatagacaaggaaggagtcattcagcattccaccatcaacaacctcggtattggccgaagtgttgatgagacaatgagaaccctccaggcattacagtatgttcaagaaaacccggatgaagtgtgccctgcgggatggaagccaggggagaaatcaatgaaacctgaccccaagctcagcaaagaatacttttcagctatctag

SEQ ID NO: 11026 - protein, 271 aa, Arabidopsis thaliana
MASIASSSSTTLLSSSRVLLPSKSSLLSPTVSVPRTLHSSSASSSSLCSGFSSLGSLTTSRSASRRNFAVKAQADDLPLVGNKAPDFEAEAVFDQEFIKVKLSEYIGKKYVILFFYPLDFTFVCPTEITAFSDRYEEFEKLNTEVLGVSVDSVFSHLAWVQTDRKSGGLGDLNYPLVSDITKSISKSFGVLIPDQGIALRGLFIIDKEGVIQHSTINNLGIGRSVDETMRTLQALQYVQENPDEVCPAGWKPGEKSMKPDPKLSKEYFSAI

SEQ ID NO: 11027 - DNA, 816 bp, Nicotiana tabacum
  CDS (1)..(816)
atggcttgctctgcttcttctacagcacttctttcttccaacccaaaagcagcttccatttcccccaaatcctcctttcaagctcccatttctcaatgtttatctgtaccttcctctttcaatgggctccgtaattgcaagccttttgtttctcgtgtagcccgttccctctctactcgcgttgctcaatcccaacgccgtcgtttcgttgttcgtgcctctagtgaacttccacttgttggaaatcaagcgccagactttgaggctgaagctgtttttgatcaagaattcatcaaggttaaactatctgagtacattgggaagaagtatgtcattctctttttctacccactagactttacatttgtttgcccaacagagatcactgctttcagtgaccgttatggagaatttgaaaagttgaacacagaaatattgggtgtttccgtagacagtgtgttctcccaccttgcctgggttcaaactgatagaaagtctggtggcctaggtgatctgaactatccattaatttccgacgtgaccaagtcaatttcaaaatcatacaatgttctgatccccgatcagggaattgcattgagaggacttttcatcattgacaaggaaggagttattcagcattcaaccattaacaatcttggaattggtcgtagtgttgatgaaacattgagaactcttcaggcattgcaatacgttcaggataacccggatgaagtgtgcccagctggatggaagcctggggagaaatccatgaagcctgaccccaagggtagcaaagaatactttgcatccatatga

SEQ ID NO: 11028 - protein, 271 aa, Nicotiana tabacum
MACSASSTALLSSNPKAASISPKSSFQAPISQCLSVPSSFNGLRNCKPFVSRVARSLSTRVAQSQRRRFVVRASSELPLVGNQAPDFEAEAVFDQEFIKVKLSEYIGKKYVILFFYPLDFTFVCPTEITAFSDRYGEFEKLNTEILGVSVDSVFSHLAWVQTDRKSGGLGDLNYPLISDVTKSISKSYNVLIPDQGIALRGLFIIDKEGVIQHSTINNLGIGRSVDETLRTLQALQYVQDNPDEVCPAGWKPGEKSMKPDPKGSKEYFASI

SEQ ID NO: 11029 - DNA, 792 bp, Pisum sativum
  CDS (1)..(792)
atggcttgctcagctccatttgcttctctcctatattcaaaccctaacacactcttctctcccaaattctcttctccgcgcctctcttctctctcaatccccaatgcacccaattctctccccaaactacgcacttccctccctctttccctcaaccgctcctcttcctctcgccgcactttcgtcgttagggcttctggtgaattaccattagttgggaactcagcgccggattttgaagctgaagctgttttcgatcaggagtttatcaaggtcaaactatctgaatatattgggaagaaatatgttatcctctttttctacccattggacttcacgttcgtttgcccaacagaaatcactgctttcagtgaccggcatgcagagtttgatgcaataaatactgagattttgggtgtttcagttgacagtgtgttctcgcaccttgcatgggttcaatcagatagaaagtcaggtggccttggtgacttgaaatatcctctggtttctgatgtcaccaaatccatatcggaatcttacggtgttctcattcccgatcagggaattgcattgagaggattgttcattatcgataaggaaggggtgatccaacattccaccatcaacaacctcggaattggtagaagtgttgacgagacaaagagaacactccaggctttgcagtatgtgcaggagaacccagatgaagtttgccctgctgggtggaagcctggtgagaagtccatgaaaccagaccccaaaggtagcaaagagtactttgctgctgtgtag

SEQ ID NO: 11030 - protein, 263 aa, Pisum sativum
MACSAPFASLLYSNPNTLFSPKFSSPRLSSLSIPNAPNSLPKLRTSLPLSLNRSSSSRRTFVVRASGELPLVGNSAPDFEAEAVFDQEFIKVKLSEYIGKKYVILFFYPLDFTFVCPTEITAFSDRHAEFDAINTEILGVSVDSVFSHLAWVQSDRKSGGLGDLKYPLVSDVTKSISESYGVLIPDQGIALRGLFIIDKEGVIQHSTINNLGIGRSVDETKRTLQALQYVQENPDEVCPAGWKPGEKSMKPDPKGSKEYFAAV

SEQ ID NO: 11031 - DNA, 783 bp, Phaseolus vulgaris
  CDS (1)..(783)
atggcttcctcagctccctgtgcttctctcatatcctcaaaccctaacattctcttctctcccaaattcccttcttcttccttttcttccctctccttccccaattcccccaactctcttttcaaacctttacgcacttctctcaatccttcatctccccctctcagaaccttcgttgccagggcttcgagtgaacttccattagttgggaacacagcaccggattttgaagcagaggccgtttttgatcaggagttcatcaaggtcaaactatctgattatattgggaaaaaatatgttatcctctttttctatccactggacttcacattcgtttgtccgacagaaatcactgccttcagtgaccggtatgcagagtttgaggcactaaatacagaaattttgggtgtttcagttgacagtgttttttcacaccttgcatgggttcaaactgatagaaagtcgggtggtcttggcgacttgaattatccattgatttctgatgtcaccaaatccatctcaaaatcttatgatgttctcattcccgatcaggggattgcattgagaggattgttcattattgacaaggaaggggttattcagcattctaccattaacaacctggccattggtagaagtgttgatgagacaaagagaacgctccaggccttgcagtatgtgcaggagaacccagatgaagtttgcccagctgggtggaagcctggtgagaagtccatgaaaccagaccctaaacttagcaaagagtacttctctgctatttag

SEQ ID NO: 11032 - protein, 260 aa, Phaseolus vulgaris
MASSAPCASLISSNPNILFSPKFPSSSFSSLSFPNSPNSLFKPLRTSLNPSSPPLRTFVARASSELPLVGNTAPDFEAEAVFDQEFIKVKLSDYIGKKYVILFFYPLDFTFVCPTEITAFSDRYAEFEALNTEILGVSVDSVFSHLAWVQTDRKSGGLGDLNYPLISDVTKSISKSYDVLIPDQGIALRGLFIIDKEGVIQHSTINNLAIGRSVDETKRTLQALQYVQENPDEVCPAGWKPGEKSMKPDPKLSKEYFSAI

SEQ ID NO: 11033 - DNA, 813 bp, Brassica napus
  CDS (1)..(813)
atggcttccttagcttcaaccaccacacttatctcttcatctagcgttcttcttccctcaaagccttctcctttttctcccgccgcctccttcctccgaactcttccttctacctccgtatctacctcctcttctctccgctcctgtttctccagcatcagtcccctcacctgcatccgctcttcctctcgccctagcttcgccgtcaaggcccaggctgatgatttgccactggttggtaacaaggcgcctgattttgaggcagaggctgtttttgaccaagagttcatcaaggtgaagctctcagagtacattggtaaaaagtatgtgattctgtttctctaccctttggacttcacttttgtctgccctacggagattactgccttcagtgaccgttatgaagaatttgagaagctaaacacggaagtgttaggtgtctcagtcgacagtgtgttctcgcatcttgcgtgggtccaaacagagagaaagtcaggagggctgggtgacctgaactacccacttgtctctgatatcactaaatccatttcaaaatcttttggagtgctcatccctgatcagggcattgcactgagagggcttttcatcatcgacaaaaaaggagtcatacagcattccacaatcaacaacctcggtattggccgaagcgttgatgagacaatgagaaccctccaggcattgcagtatgttcaagaaaaccctgatgaggtttgccccgcgggatggaagcctggggagaaatcgatgaagcctgaccccaagctgagcaaagagtatttttcagctatttaa

SEQ ID NO: 11034 - protein, 270 aa, Brassica napus
MASLASTTTLISSSSVLLPSKPSPFSPAASFLRTLPSTSVSTSSSLRSCFSSISPLTCIRSSSRPSFAVKAQADDLPLVGNKAPDFEAEAVFDQEFIKVKLSEYIGKKYVILFLYPLDFTFVCPTEITAFSDRYEEFEKLNTEVLGVSVDSVFSHLAWVQTERKSGGLGDLNYPLVSDITKSISKSFGVLIPDQGIALRGLFIIDKKGVIQHSTINNLGIGRSVDETMRTLQALQYVQENPDEVCPAGWKPGEKSMKPDPKLSKEYFSAI

SEQ ID NO: 11035 - DNA, 828 bp, Riccia fluitans
  CDS (1)..(828)
atggcaaccgcctgtgctgcagtgtctgcagtggctgttcctgtggcctctgtagctaaccacattgcgtcttcatcatctgggaccccatcccttgccattcccaggtcttatgagggtttaaacaaatccttcggcgctagaattgcaccccgatcaacctccgcttttcgcaagcccgtcactggtgtctccctcaagcagttctcgaagggaaaagtcgcttctgcgagatgtgcgtcacctcttgttggaaatgtcgccccggacttcgaggcggaggccgtttttgaccaagagttcgtgaagatcaagctctcggagtacattgggaagagatacgttgttcttttcttctaccctcttgacttcaccttcgtttgcccaacagaaattaccgcatttagcgacaaacacgaagagtttgagaagttgaacaccgaagttattggggtttctactgacagtgtgttttcccatcttgcctggattcaaactgacagaaaatctggaggacttggtgacttgaagtacccacttgtgtccgacttgaccaagaagatcgctgaagattttggagtattgatccccgatcagggcattgcattgcgaggattgttcatcatcgacaaggagggcgtcattcagcacgcaaccattaacaatttggccatcggcagaagtgtggaggagacgcttcgaactctgcaggctgtacaatatgtgcaggagaacccagacgaggtctgccccgctggctggaagccgggtgaaaagaccatgaagcctgacacaaagctcagcaaggagtacttcgcacaagtatag

SEQ ID NO: 11036 - protein, 275 aa, Riccia fluitans
MATACAAVSAVAVPVASVANHIASSSSGTPSLAIPRSYEGLNKSFGARIAPRSTSAFRKPVTGVSLKQFSKGKVASARCASPLVGNVAPDFEAEAVFDQEFVKIKLSEYIGKRYVVLFFYPLDFTFVCPTEITAFSDKHEEFEKLNTEVIGVSTDSVFSHLAWIQTDRKSGGLGDLKYPLVSDLTKKIAEDFGVLIPDQGIALRGLFIIDKEGVIQHATINNLAIGRSVEETLRTLQAVQYVQENPDEVCPAGWKPGEKTMKPDTKLSKEYFAQV

SEQ ID NO: 11037 - DNA, 822 bp, Brassica campestris
  CDS (1)..(822)
  misc_feature (657)..(657): n is a, g, c or t
atggcgtctgttgcttcttcaaccactctcatctcctcctccgctagtgttctcccagccaccaagtcttcgcttcttccatctccctccctctctttccttccaaccctctcctctccttccccatccgcttctctccggtccctcgtccctctcccctcacctcaatccgcttcctcttctcgccggagcttcgctgtcaagggccaaaccgatgatcttccattggttggaaacaaggcgcctgattttgaggcagagggtgtgttcgatcaggagttcatcaagttcatcaaggtcaagctctctgattacattgggaaaaagtatgtgattctcttttttctaccccttgacttcactttcgtctgcccaacagaaattactgccttcagtgaccgatatgcagaatttgagaagctgaatacagaagtgttaggtgtttctgttgatagtgtgagtgtgttctcccaccttgctggggttcaaaccgacagaaaatttggaggacttggtgatctcaactatccacttatatcagatgtcactaaatctatctcaaaatcttttggagtgctcatccatgatcagggaatagcgttgagagggcttttcataatagacaaggaaggagtgatccaacattcaaccatcaanaatcttggtattggccgaagtgttgatgagacaatgagaacccttcaggcattacagtacatccaggaaggccctggtgaagtctgccctgcaggatggaaaccaggggagaagtcaatgaaacctgaccccaagctcagcaaagagctcttctcagctatttag

SEQ ID NO: 11038 - protein, 273 aa, Brassica campestris
  misc_feature (219)..(219): The Xaa at location 219 stands for Asn, or Lys.
MASVASSTTLISSSASVLPATKSSLLPSPSLSFLPTLSSPSPSASLRSLVPLPSPQSASSSRRSFAVKGQTDDLPLVGNKAPDFEAEGVFDQEFIKFIKVKLSDYIGKKYVILFFLPLDFTFVCPTEITAFSDRYAEFEKLNTEVLGVSVDSVSVFSHLAGVQTDRKFGGLGDLNYPLISDVTKSISKSFGVLIHDQGIALRGLFIIDKEGVIQHSTIXNLGIGRSVDETMRTLQALQYIQEGPGEVCPAGWKPGEKSMKPDPKLSKELFSAI

SEQ ID NO: 11039 - DNA, 816 bp, Arabidopsis thaliana
  CDS (1)..(816)
atggcgtctatagcttcttcttcttccaccaccctactctcttcctctagggttcttcttccctccaagtcttctcttttatctcctaccgtctctttccccagaatcataccctcttcctcggcatcatcctcttctctctgttccgggttctccagtctcggttccctcaccaccaaccgctccgcctcacgccggaacttcgccgtcaaggctcaggctgatgatttaccactggtcggtaataaggcgcctgattttgaagctgaggcagtttttgatcaagagttcataaaggtgaagctctctgagtacattggcaaaaagtatgttattctattcttctaccctttggacttcacttttgtctgccccactgagattactgccttcagtgaccgttatgaagaatttgagaagctaaacaccgaagtattaggggtctctgtcgacagtgtgttctcgcatcttgcgtgggtccaaacagacagaaagtcgggagggctcggtgatctgaattatcctcttgtttcggatatcactaaatccatttcaaaatcgtttggagtgctcatccctgatcagggcattgcactgagagggcttttcatcatagacaaggaaggagtcattcagcattccaccatcaacaacctcggtattggccgaagtgttgatgagacaatgagaaccctccaggcattacagtatgttcaagaaaacccggatgaagtgtgccctgcgggatggaagccaggggagaaatcaatgaaacctgaccccaagctcagcaaagaatacttttcagctatctag

SEQ ID NO: 11040 - protein, 271 aa, Arabidopsis thaliana
MASIASSSSTTLLSSSRVLLPSKSSLLSPTVSFPRIIPSSSASSSSLCSGFSSLGSLTTNRSASRRNFAVKAQADDLPLVGNKAPDFEAEAVFDQEFIKVKLSEYIGKKYVILFFYPLDFTFVCPTEITAFSDRYEEFEKLNTEVLGVSVDSVFSHLAWVQTDRKSGGLGDLNYPLVSDITKSISKSFGVLIPDQGIALRGLFIIDKEGVIQHSTINNLGIGRSVDETMRTLQALQYVQENPDEVCPAGWKPGEKSMKPDPKLSKEYFSAI

SEQ ID NO: 11041 - DNA, 798 bp, Spinacia oleracea
  CDS (1)..(798)
atggcgtgtgttgcttcttcaactactctcatctcttctccctcttctagggtttttccagcaaagtcttcactttcctctccatctgtttctttccttcgaaccctttcttctccttccgcatctgcttctctccgctccggatttgctcgacgctcttccctcagctccacttctcgtcggagctttgctgtcaaagcccaggccgatgatcttccactggttggaaacaaggcgcctgattttgaggcagaggctgtgtttgatcaagagttcatcaaggttaagctctctgattacattggaaagaagtatgtgattctgtttttctacccattggactttactttcgtctgcccaacagagattactgccttcagtgaccggcattcagaatttgagaagttgaacaccgaagtattaggtgtttctgtcgatagtgtgttctctcaccttgcatgggtccaaacagacaggaaatctggagggcttggtgatctgaactatccccttatttcagatgtcactaaatcaatctcaaagtcgttcggagtgctcatccatgatcagggaatagcactgagaggacttttcataatcgacaaggaaggagtgatccaacattccaccatcaacaatcttggtattggccgaagcgttgatgagacaatgagaaccctccaggcattacagtacacaggaaacccggatgaagtctgcccagcaggatggaagccgggtgagaagtcaatgaaacccgacccaaaactcagcaaggagtacttctcagctatttag

SEQ ID NO: 11042 - protein, 265 aa, Spinacia oleracea
MACVASSTTLISSPSSRVFPAKSSLSSPSVSFLRTLSSPSASASLRSGFARRSSLSSTSRRSFAVKAQADDLPLVGNKAPDFEAEAVFDQEFIKVKLSDYIGKKYVILFFYPLDFTFVCPTEITAFSDRHSEFEKLNTEVLGVSVDSVFSHLAWVQTDRKSGGLGDLNYPLISDVTKSISKSFGVLIHDQGIALRGLFIIDKEGVIQHSTINNLGIGRSVDETMRTLQALQYTGNPDEVCPAGWKPGEKSMKPDPKLSKEYFSAI

SEQ ID NO: 11043 - DNA, 810 bp, Brassica napus
  CDS (1)..(810)
atggcttccttagcttcatccaccacacttatctcttcatccaccgttcttcttccctcaaagccttctcctttttctcccgccgcctccttcctccgaactcttccttctaccgctgcatcaccgtcttctctccgttccggtttctccagcattggctccctcacctgcatccgctcttcctctcgccgtagcttcgccgtcaaggcccaggccgatgatttgccactggttggtaacaaagcgcctgattttgaggcagaggctgtttttgatcaagagttcatcaaggtgaagctctcagagtacattggtaaaaagtatgtgattctgtttctctaccctttggacttcacttttgtctgccctacggagattactgccttcagtgaccgttatgaagaatttgagaagctaaacacggaagtgttaggtgtctcagtcgacagtgtgttctcgcatcttgcgtgggtccaaacagagagaaagtcaggagggctcggtgatctgaactacccacttgtctctgatatcactaaatccatttcaaaatcttttggtgtgctcatccctgatcagggcattgcactgagagggcttttcatcatcgacaaggaaggagtcatacagcattccaccatcaacaacctcggtattggccgaagcgttgatgagacaatgagaaccctccaggcattacagtatgttcaagaaaaccctgatgaggtctgccccgcgggatggaagcctggggagaaatcgatgaagcctgaccccaagctgagcaaagagtatttttcagctatttaa

SEQ ID NO: 11044 - protein, 269 aa, Brassica napus
MASLASSTTLISSSTVLLPSKPSPFSPAASFLRTLPSTAASPSSLRSGFSSIGSLTCIRSSSRRSFAVKAQADDLPLVGNKAPDFEAEAVFDQEFIKVKLSEYIGKKYVILFLYPLDFTFVCPTEITAFSDRYEEFEKLNTEVLGVSVDSVFSHLAWVQTERKSGGLGDLNYPLVSDITKSISKSFGVLIPDQGIALRGLFIIDKEGVIQHSTINNLGIGRSVDETMRTLQALQYVQENPDEVCPAGWKPGEKSMKPDPKLSKEYFSAI

SEQ ID NO: 11045 - DNA, 813 bp, Brassica napus
  CDS (1)..(813)
atggcttccttagcttcatccaccacacttatctcttcatccaccgttcttcttccctcaaagccttctcctttttctcccgccgcctccttcctccgaactcttccttctacctccgtatctacctcctcttctctccgctcctgtttctccagcatcagtcccctcacctgcatccgctcttcctctcgccctagcttcgccgtcaaggcccaggctgatgatttgccactggttggtaacaaggcgcctgattttgaggcagaggctgtttttgatcaagagttcatcaaggtgaagctctcagagtacattggtaaaaagtatgtgattctgtttctctaccctttggacttcacttttgtctgccctacggagattactgccttcagtgaccgttatgaagaatttgagaagctaaacacggaagtgttaggtgtctcagtcgacagtgtgttctcgcatcttgcgtgggtccaaacagagagaaagtcaggagggctcggtgatctgaactacccacttgtctctgatatcactaaatccatttcaaaatcttttggtgtgctcatccctgatcagggcattgcactgagagggcttttcatcatcgacaaggaaggagtcatacagcattccaccatcaacaacctcggtattggccgaagcgttgatgagacaatgagaaccctccaggcattacagtatgttcaagaaaaccctgatgaggtctgccccgcgggatggaagcctggggagaaatcgatgaagcctgaccccaagctgagcaaagagtatttttcagctatttaa

SEQ ID NO: 11046 - protein, 270 aa, Brassica napus
MASLASSTTLISSSTVLLPSKPSPFSPAASFLRTLPSTSVSTSSSLRSCFSSISPLTCIRSSSRPSFAVKAQADDLPLVGNKAPDFEAEAVFDQEFIKVKLSEYIGKKYVILFLYPLDFTFVCPTEITAFSDRYEEFEKLNTEVLGVSVDSVFSHLAWVQTERKSGGLGDLNYPLVSDITKSISKSFGVLIPDQGIALRGLFIIDKEGVIQHSTINNLGIGRSVDETMRTLQALQYVQENPDEVCPAGWKPGEKSMKPDPKLSKEYFSAI

SEQ ID NO: 11047 - DNA, 789 bp, Hordeum vulgare
  CDS (1)..(789)
atggcgtgcgccatctccgcctccaccgtgtccacggccgccgcgctcgtcgcgtccccgaagacatccggggcgccgcagtgcctgtcgtttccccgcgctttcggaggcgctgcagccaggcccgcccgcctcgccgccgccggctcgaggacggccagggcccgtagcttcgtcgcccgcgccgcagccgagtacgacctgccgctggtggggaacaaagcgccggacttcgcggcggaggctgtgttcgaccaggagttcatcaacgtcaagctatctgattacattgggaagaagtatgtgattcttttcttctaccctctggacttcaccttcgtctgcccaactgagattacggctttcagcgacagacatgaggagttcgagaagataaacactgaaattcttggtgtttcggttgacagtgtgttttcccatcttgcatgggtgcagacagagaggaagtctggtggacttggtgatctgaaatatccgctggtttctgacgtcaccaaatcgatctcaaagtcttttggtgtattgatccctgatcagggaattgctctgagaggattattcatcattgacaaggagggtgtgattcaacactccactattaacaaccttggtattggccgtagtgtggatgagaccttgagaacccttcaggctctgcaatacgtccaagaaaacccagacgaggtctgcccggcaggatggaaacctggggaaaagtcgatgaagcctgaccctaagggcagcaaggagtacttcgctgctatctag

SEQ ID NO: 11048 - protein, 262 aa, Hordeum vulgare
MACAISASTVSTAAALVASPKTSGAPQCLSFPRAFGGAAARPARLAAAGSRTARARSFVARAAAEYDLPLVGNKAPDFAAEAVFDQEFINVKLSDYIGKKYVILFFYPLDFTFVCPTEITAFSDRHEEFEKINTEILGVSVDSVFSHLAWVQTERKSGGLGDLKYPLVSDVTKSISKSFGVLIPDQGIALRGLFIIDKEGVIQHSTINNLGIGRSVDETLRTLQALQYVQENPDEVCPAGWKPGEKSMKPDPKGSKEYFAAI

SEQ ID NO: 11049 - DNA, 777 bp, Triticum aestivum
  CDS (1)..(777)
atggcgtgcgccttctccgcctccaccgtgtccacggccgccgcgctcgtcgcgtccccgaagccagccggggtgccgcagtgcctgtcgtttccccgcgccgccgccaggccctcccgcctcgccgccgccggctcgaggacggccagggcccgcagcttcgtcgcccgcgccgcagccgagtacgacctgccgctggtggggaacaaggcgccggacttcgcggcagaggccgtgttcgaccaggagttcatcaacgtcaagctatctgattacattgggaagaagtatgtgattcttttcttctaccctctggacttcaccttcgtctgcccaactgagattacggctttcagcgacagacatgaggagttcgagaagataaacactgaaattcttggtgtttcagttgatagtgtgttttcccatcttgcatgggtgcagacagagaggaaatctggtggacttggtgatcttaagtatccgctggtttctgatgtcaccaaatcaatctcaaagtcttttggtgtattgatccctgatcagggaattgctctgagaggattattcatcattgacaaggagggtgtgattcagcattccactattaacaaccttggtattggccgcagtgtggatgagaccttgagaacccttcaggctctgcaatacgtccaagaaaacccagacgaggtctgcccggcaggatggaaacctggggaaaagtcgatgaagcctgaccctaagggcagcaaggagtacttcgctgccatctag

SEQ ID NO: 11050 - protein, 258 aa, Triticum aestivum
MACAFSASTVSTAAALVASPKPAGVPQCLSFPRAAARPSRLAAAGSRTARARSFVARAAAEYDLPLVGNKAPDFAAEAVFDQEFINVKLSDYIGKKYVILFFYPLDFTFVCPTEITAFSDRHEEFEKINTEILGVSVDSVFSHLAWVQTERKSGGLGDLKYPLVSDVTKSISKSFGVLIPDQGIALRGLFIIDKEGVIQHSTINNLGIGRSVDETLRTLQALQYVQENPDEVCPAGWKPGEKSMKPDPKGSKEYFAAI

SEQ ID NO: 11051 - DNA, 789 bp, Triticum aestivum
  CDS (1)..(789)
atgacagccgcggccatggcgtgcgccttctccgcctccaccgtgtccacggacgccgagctcgtcgcgtccccaaagccagccggggtgccgaagtgcctgtcgtttccccgagccgccggcaggccctcccgcctcgccggcgccggttcgaggacggacagggcccgcagcttcgtcgcccgcgccggaaccgagtacaacctgccgctggtggggaacaaggcgccggacttcgcggcagaggccgtgttcgaccaggagttcatcaacgtcaagctatctgattacattgggaagaagtatgtgattcttatcttctaccctctggacttcaccttcgtctgcccaactgagattacggcttacagcgacagacatgaggagttcgagaagataaacactgaaattcttggtgtcccagtagatagtgtgtattcccatcttgcatgggtgcagacagagaggaaatctggtggacttggtgatctaaagtatccactggtttctgatgtcaccaaatcaatctcaaagtctattggtgtatggatccctgatcaggtaattgctctgagaggattattcatcattgacaaggagggtgtgattcatgatcccactatgaacaaccttggtattgggcgcactgtggatgagaccttgagaaccctacatgctctgcaatacgtccaagaaaacccagaccaggtctgcccggcaggatggaaacctgaggaaagtcgatcaagcctgaccttagggaagaaggattacttcgctgccatctag

SEQ ID NO: 11052 - protein, 262 aa, Triticum aestivum
MTAAAMACAFSASTVSTDAELVASPKPAGVPKCLSFPRAAGRPSRLAGAGSRTDRARSFVARAGTEYNLPLVGNKAPDFAAEAVFDQEFINVKLSDYIGKKYVILIFYPLDFTFVCPTEITAYSDRHEEFEKINTEILGVPVDSVYSHLAWVQTERKSGGLGDLKYPLVSDVTKSISKSIGVWIPDQVIALRGLFIIDKEGVIHDPTMNNLGIGRTVDETLRTLHALQYVQENPDQVCPAGWKPEESRSSLTLGKKDYFAAI

SEQ ID NO: 11053 - DNA, 783 bp, Zea mays
  CDS (1)..(783)
atggcctgctccttcgccgccgcgaccgtcgtctcttccgcccccaccccggccgccaggcccctcgccgttgccccgcagtccgtctctgtctcccgctccgccgccgccgccgccgccaggccgctccgcctcgtcgcctccagatccgcgcgggccaccagactcgtcgcccgcgccggcggcgtcgatgacttgccgctggtcgggaacaaggcgccagacttcgaagccgaggccgtgttcgaccaagagttcatcaacgtgaagctctctgattacatcgggaagaaatacgtcgttctgttcttctaccccttggatttcacctttgtctgcccgaccgagattactgccttcagtgacagatatgaggaattcgagaagttgaacactgaggttcttggtgtctctattgacagtgtgttctcccaccttgcatgggtgcagacagacaggaagtctggtgggcttggcgatcttaaatacccacttatttctgatgtcaccaaatcaatttcaaaggccttcggtgttctgatccctgaccagggtatcgctctgagaggactgttcatcattgacaaggagggagtgattcagcactctaccattaacaaccttgccattggtcgcagtgtggacgagaccatgaggacccttcaggcattgcagtacgtccaggagaacccagacgaggtctgcccggccggttggaagccaggggagaggtccatgaagcccgaccccaagggaagcaaagagtacttcgcggccgtctag

SEQ ID NO: 11054 - protein, 260 aa, Zea mays
MACSFAAATVVSSAPTPAARPLAVAPQSVSVSRSAAAAAARPLRLVASRSARATRLVARAGGVDDLPLVGNKAPDFEAEAVFDQEFINVKLSDYIGKKYVVLFFYPLDFTFVCPTEITAFSDRYEEFEKLNTEVLGVSIDSVFSHLAWVQTDRKSGGLGDLKYPLISDVTKSISKAFGVLIPDQGIALRGLFIIDKEGVIQHSTINNLAIGRSVDETMRTLQALQYVQENPDEVCPAGWKPGERSMKPDPKGSKEYFAAV

SEQ ID NO: 11055 - DNA, 20 bp, Artificial sequence
  primer
atgtcaatggcgtctatagc

SEQ ID NO: 11056 - DNA, 21 bp, Artificial sequence
  primer
ctagatagctgaaaagtattc

SEQ ID NO: 11057 - protein, 200 aa, Artificial sequence
  consensus sequence
  Variant (2)..(4): Xaa in position 2 to 4 is any amino acid
  Variant (7)..(7): Xaa in position 7 is any amino acid
  Variant (9)..(11): Xaa in position 9 to 11 is any amino acid
  Variant (14)..(17): Xaa in position 14 to 17 is any amino acid
  Variant (18)..(21): Xaa in position 18 to 21 is any or no amino acid
  Variant (23)..(26): Xaa in position 23 to 26 is any amino acid
  Variant (27)..(29): Xaa in position 27 to 29 is any or no amino acid
  Variant (31)..(35): Xaa in position 31 to 35 is any amino acid
  Variant (36)..(37): Xaa in position 36 to 37 is any or no amino acid
  Variant (39)..(39): Xaa in position 39 is any amino acid
  Variant (41)..(41): Xaa in position 41 is any amino acid
  Variant (58)..(58): Xaa in position 58 is any amino acid
  Variant (61)..(66): Xaa in position 61 to 66 is any amino acid
  Variant (68)..(72): Xaa in position 68 to 72 is any amino acid
  Variant (74)..(75): Xaa in position 74 to 75 is any amino acid
  Variant (77)..(77): Xaa in position 77 is any amino acid
  Variant (79)..(79): Xaa in position 79 is any amino acid
  Variant (81)..(82): Xaa in position 81 to 82 is any amino acid
  Variant (84)..(86): Xaa in position 84 to 86 is any amino acid
  Variant (91)..(92): Xaa in position 91 to 92 is any amino acid
  Variant (94)..(97): Xaa in position 94 to 97 is any amino acid
  Variant (100)..(100): Xaa in position 100 is any amino acid
  Variant (102)..(104): Xaa in position 102 to 104 is any amino acid
  Variant (105)..(105): Xaa in position 105 is any or no amino acid
  Variant (109)..(110): Xaa in position 109 to 110 is any amino acid
  Variant (112)..(115): Xaa in position 112 to 115 is any amino acid
  Variant (117)..(121): Xaa in position 117 to 121 is any amino acid
  Variant (124)..(126): Xaa in position 124 to 126 is any amino acid
  Variant (127)..(142): Xaa in position 127 to 142 is any or no amino acid
  Variant (144)..(144): Xaa in position 144 is any amino acid
  Variant (151)..(151): Xaa in position 151 is any amino acid
  Variant (154)..(155): Xaa in position 154 to 155 is any amino acid
  Variant (157)..(163): Xaa in position 157 to 163 is any amino acid
  Variant (165)..(165): Xaa in position 165 is any amino acid
  Variant (167)..(168): Xaa in position 167 to 168 is any amino acid
  Variant (171)..(171): Xaa in position 171 is any amino acid
  Variant (175)..(176): Xaa in position 175 to 176 is any amino acid
  Variant (178)..(180): Xaa in position 178 to 180 is any amino acid
  Variant (182)..(182): Xaa in position 182 is any amino acid
  Variant (184)..(186): Xaa in position 184 to 186 is any amino acid
  Variant (187)..(190): Xaa in position 187 to 190 is any or no amino acid
  Variant (196)..(196): Xaa in position 196 is any amino acid
  Variant (198)..(199): Xaa in position 198 to 199 is any amino acid
VXXXAPXFXXXAVXXXXXXXXFXXXXXXXLXXXXXXXKXVXLFFYPLDFTFVCPTEIXAFXXXXXXFXXXXXEXXGXSXDXXSXXXHLAWXXTXXXXGGXGXXXXYPLXXDXXXXIXXXXXVLXXXXXXXXXXXXXXXXXXXGXALRGLFXIDXXGXXXXXXXNXLXXGRXVDEXXRXXXAXQXXXXXXXEVCPAXWXXG

SEQ ID NO: 11058 - protein, 45 aa, Artificial sequence
  protein pattern
  Variant (2)..(2): Xaa in position 2 is any amino acid
  Variant (3)..(3): Xaa in position 3 is any or no amino acid
  Variant (5)..(5): Xaa in position 5 is any or no amino acid
  Variant (11)..(11): Xaa in position 11 is any amino acid
  Variant (12)..(12): Xaa in position 12 is Asp or Asn
  Variant (15)..(15): Xaa in position 15 is Phe or Tyr
  Variant (19)..(19): Xaa in position 19 is Ser or Thr
  Variant (21)..(21): Xaa in position 21 is Ile, Leu or Val
  Variant (22)..(22): Xaa in position 22 is any amino acid
  Variant (23)..(23): Xaa in position 23 is Ala, Glu or Gly
  Variant (24)..(24): Xaa in position 24 is any amino acid
  Variant (25)..(25): Xaa in position 25 is Asp, Glu, Asn, Gln or Ser
  Variant (26)..(30): Xaa in position 26 to 30 is any amino acid
  Variant (32)..(37): Xaa in position 32 to 37 is any amino acid
  Variant (38)..(38): Xaa in position 38 is Ile, Leu or Val
  Variant (39)..(39): Xaa in position 39 is Ile, Leu, Met or Val
  Variant (40)..(40): Xaa in position 40 is Ala or Gly
  Variant (41)..(41): Xaa in position 41 is any amino acid
  Variant (43)..(43): Xaa in position 43 is any amino acid
  Variant (45)..(45): Xaa in position 45 is Asp, Ser or Thr
KXXVXLFFYPXXFTXVCPXEXXXXXXXXXXFXXXXXXXXXXSXDX

SEQ ID NO: 11059 - protein, 38 aa, Artificial sequence
  protein pattern
  Variant (5)..(5): Xaa in position 5 is any or no amino acid
  Variant (7)..(9): Xaa in position 7 to 9 is any amino acid
  Variant (10)..(10): Xaa in position 10 is any or no amino acid
  Variant (12)..(12): Xaa in position 12 is any amino acid
  Variant (13)..(13): Xaa in position 13 is Ile, Leu or Val
  Variant (14)..(16): Xaa in position 14 to 16 is any amino acid
  Variant (17)..(17): Xaa in position 17 is Pro, Thr or Val
  Variant (18)..(18): Xaa in position 18 is Ile, Met or Val
  Variant (19)..(21): Xaa in position 19 to 21 is any amino acid
  Variant (22)..(22): Xaa in position 22 is Ala, Asp, Gly, Asn, Pro or Ser
  Variant (23)..(23): Xaa in position 23 is Phe, Ile, Leu or Val
  Variant (26)..(26): Xaa in position 26 is Asp, Asn, Ser or Thr
  Variant (27)..(27): Xaa in position 27 is Ile, Leu or Val
  Variant (28)..(28): Xaa in position 28 is Asp, Glu, Gly, Asn, Ser or Thr
  Variant (30)..(30): Xaa in position 30 is Ala, Thr or Val
  Variant (31)..(31): Xaa in position 31 is any amino acid
  Variant (33)..(33): Xaa in position 33 is any amino acid
  Variant (34)..(34): Xaa in position 34 is Ile, Leu or Val
  Variant (35)..(35): Xaa in position 35 is any amino acid
  Variant (36)..(36): Xaa in position 36 is Ala or Gly
  Variant (37)..(37): Xaa in position 37 is any amino acid
RGLFXIXXXXGXXXXXXXXXXXXGRXXXEXXRXXXXXQ

SEQ ID NO: 11060 - protein, 14 aa, Artificial sequence
  protein pattern
  Variant (5)..(5): Xaa in position 5 is Ala or Val
  Variant (6)..(6): Xaa in position 6 is Asp, Glu, Gly or Asn
  Variant (8)..(9): Xaa in position 8 to 9 is any amino acid
  Variant (11)..(12): Xaa in position 11 to 12 is any amino acid
  Variant (13)..(13): Xaa in position 13 is Ala, Gly, Ser or Thr
  Variant (14)..(14): Xaa in position 14 is Ile, Leu or Met
EVCPXXWXXGXXXX

SEQ ID NO: 11061 - DNA, 768 bp, Populus trichocarpa
  CDS (1)..(768)
atggcgacgagcaacagcgcgaacggtgacatgttgatgctagaagcagcaccagaggcctcacgtccctggtccacctcttccaatgctgaaataattgatgcactgccttacatcgacgacgattacggaaacccttctgtgaaagctgaagtcgatcgtcttgtcgaggaagagatgcgtcgaagctccaaaaaaccctcagatttcttaaaagaattgccacccgtccccaaattcgctttcgggaattatccgatgcttgctaaagagtacgagagagtgagagcggggaggccgccggttacgctcgatttttcgaggtattctcatttggatttgccagctgcgaacaaaatgaatgacgagactgcttggaaacaggctcttcagcgtgcccaacgcttgctgcagcatcaagtaatcaggctggaaaacttggaactcatgtcaaaatatggtcctgaggtttggatacagcacaaccgacagttggaaacaatgctaaccagaacacaaaaattagcacgggaacaaaatgaaaagattgaagctgtgaaccgtgaaaggaaatatcatcagcaaaatactgcatatgagctgaatgctttatccgcacaatggaaggagctttgtcagaaaaatatagaaatccaagaggcatgtattaaaattgaaaatcagatagaggaacttaagagagaatcttcagagagaggctggaatgtggaagctaacatagaaaacggttccctgttgcattcataa

SEQ ID NO: 11062 - protein, 255 aa, Populus trichocarpa
MATSNSANGDMLMLEAAPEASRPWSTSSNAEIIDALPYIDDDYGNPSVKAEVDRLVEEEMRRSSKKPSDFLKELPPVPKFAFGNYPMLAKEYERVRAGRPPVTLDFSRYSHLDLPAANKMNDETAWKQALQRAQRLLQHQVIRLENLELMSKYGPEVWIQHNRQLETMLTRTQKLAREQNEKIEAVNRERKYHQQNTAYELNALSAQWKELCQKNIEIQEACIKIENQIEELKRESSERGWNVEANIENGSLLHS

SEQ ID NO: 11063 - DNA, 771 bp, Oryza sativa
  CDS (1)..(771)
atggcgtcgtcgtcggggacgagggaggtgctcatgctggaggccccgccggcgccctccggggcgccgtggcgcgcgccgccggacgcggaggccgtggacgcgctgccctacatcgacggcgactacggcgacccggcggtgaagcgggaggtggaccggatggtggaggaggagatgcggcgcgggagccgcaagcccgccgacttcctccgcgacctcccccccgtccccgccatcgggttcgagaatcatcctatgcttgctaaagagtacgagcgtgttagagctgggaaacctcctgctaccatagagatgtcccgctatggtttggagccacccccagcgaacaagaggaatgatgttgctgcatggaggcaggctctaagaaatgctcagagccagctgcaccatcaaatcataaggatagagaatctggagcttatgctgaagtatggtgttgaggtttggaagcttcagaatagacaaatggaatcagttttgtctaggatgcaaaagatggctgtcgaatacaatgagaagatagaaactgtcaaccgcgagaggaaatttcaccagcaaaacactggtggtcaactccatgccttgacgacggaatggcaggagctgtgtcagaaaaatatagctattcaagctgcatgtgttgatctgcagaatcagattgatcagcttaaacttggagctaaagaattgggaatgcccatcgatgacagcaccggaactaatcagcaagcatcatcagccatttga

SEQ ID NO: 11064 - protein, 256 aa, Oryza sativa
MASSSGTREVLMLEAPPAPSGAPWRAPPDAEAVDALPYIDGDYGDPAVKREVDRMVEEEMRRGSRKPADFLRDLPPVPAIGFENHPMLAKEYERVRAGKPPATIEMSRYGLEPPPANKRNDVAAWRQALRNAQSQLHHQIIRIENLELMLKYGVEVWKLQNRQMESVLSRMQKMAVEYNEKIETVNRERKFHQQNTGGQLHALTTEWQELCQKNIAIQAACVDLQNQIDQLKLGAKELGMPIDDSTGTNQQASSAI

SEQ ID NO: 11065 - DNA, 762 bp, Glycine max
  CDS (1)..(762)
atggcggatggaagcaacgggggagttctaatgctggaagccccaccgtcttacggtaggcctaccggttctaacgcggaaataatcgacgcattgccttacattgatgacgactacgcagaccccagagtcaaacttgaggttgaccgtctcgtggaggatgagatgcgtcgcagcaccaagaagcccaccgatttcctcaaagatttccctcctcttcccaactccaatttccagcagaactacccaatgattgcgagagagtacgaacgtgtgagagccggaagacctcccgttgctcttgatagatcgcgctacgaattggaaatgccgccggcgaataaaaggaacgacgaaactgcttggaagcaagctcttcatagagctcaacacctgctgcaatatcagattatgaggatggaaaatttggatttgatgttaaaatatggtcccgatacctggaaacaacacaaccaaagattggaagtatacttatcaagaatgcagaaattagctcaggaacaaaatgaaaagattgaaaaagtaaaccgtgaaaggaaatatcatcagcaaaacactgcatatgagcttaatgcgttgtccatgcaatggaaggagctttgtcagaagaatatagacatcagtgctgcctgtgcttcagttgaaaatcgcataaatgaattgaaaagaggagcagcagaaagaggctggaacttggaagctgtaactgaaaatggccaattggcaaaatccgaattatga

SEQ ID NO: 11066 - protein, 253 aa, Glycine max
MADGSNGGVLMLEAPPSYGRPTGSNAEIIDALPYIDDDYADPRVKLEVDRLVEDEMRRSTKKPTDFLKDFPPLPNSNFQQNYPMIAREYERVRAGRPPVALDRSRYELEMPPANKRNDETAWKQALHRAQHLLQYQIMRMENLDLMLKYGPDTWKQHNQRLEVYLSRMQKLAQEQNEKIEKVNRERKYHQQNTAYELNALSMQWKELCQKNIDISAACASVENRINELKRGAAERGWNLEAVTENGQLAKSEL

SEQ ID NO: 11067 - DNA, 759 bp, Glycine max
  CDS (1)..(759)
atggcggatggaagcaacgggggagttctaatgctggaagccccaccgtcttacggtaggcctaccggttctaacgcggaaataatcgacgcattgccttacattgatgacgactacgcagaccccagagtcaaacttgaggttgaccgtctcgtggaggatgagatgcgtcgcagcaccaagaagcccaccgatttcctcaaagatttccctcctcttcccaactccaatttccagaactacccaatgattgcgagagagtacgaacgtgtgagagccggaagacctcccgttgctcttgatagatcgcgctacgaattggaaatgccgccggcgaataaaaggaacgacgaaactgcttggaagcaagctcttcatagagctcaacacctgctgcaatatcagattatgaggatggaaaatttggatttgatgttaaaatatggtcccgatacctggaaacaacacaaccaaagattggaagtatacttatcaagaatgcagaaattagctcaggaacaaaatgaaaagattgaaaaagtaaaccgtgaaaggaaatatcatcagcaaaacactgcatatgagcttaatgcgttgtccatgcaatggaaggagctttgtcagaagaatatagacatcagtgctgcctgtgcttcagttgaaaatcgcataaatgaattgaaaagaggagcagcagaaagaggctggaacttggaagctgtaactgaaaatggccaattggcaaaatccgaattatga

SEQ ID NO: 11068 - protein, 252 aa, Glycine max
MADGSNGGVLMLEAPPSYGRPTGSNAEIIDALPYIDDDYADPRVKLEVDRLVEDEMRRSTKKPTDFLKDFPPLPNSNFQNYPMIAREYERVRAGRPPVALDRSRYELEMPPANKRNDETAWKQALHRAQHLLQYQIMRMENLDLMLKYGPDTWKQHNQRLEVYLSRMQKLAQEQNEKIEKVNRERKYHQQNTAYELNALSMQWKELCQKNIDISAACASVENRINELKRGAAERGWNLEAVTENGQLAKSEL

SEQ ID NO: 11069 - DNA, 765 bp, Zea mays
  CDS (1)..(765)
atggcctcgtcggcgacgagagaggttctcatgcttgaggcgcctccgccgtccgaccccgctgcggggccctggcgcgcggtgccggaagcggaggccattgacgcgctgccctacatcgacggcgactacggcgatgcggcggtgaagcgggaggtcgatcgcctcgtcgaggaggagatgcgccgagggaagcgcaagcctgcagacttcctccgggacctgccccctgttcccaccgccggattcgagaatcatcctatgcttgctaaagaatatgaacgtgttagggctggcaaacctccttttatgctagatatgtctcgctatggtttggagccacctccaatgaacaagaggaatgatgttggcgcttggaggcaggctctacggaatgctcagagccagttgcagcatcaaattataaggatagagaatctcgagcttatgctgaaatatggcgtagatgtttggaagctccagaacagacaaatggaatcagttctgtctaggatgcaaaagatggctgtagaatacaatgaaaggatagaaaatgtcaatcgagagaggaagttccaccagcaaaatactggaggacagctgcatgccctgaaaatggaatggcaggagctgtgtcaaaaaaatatagctattcaggctgcttgtgttgacctgcagaatcatattgaccagcttaaacttgaagcaaaagaactgggaatgcccatggacgacaactcaggaaccgacccacaagcatcatga

SEQ ID NO: 11070 - protein, 254 aa, Zea mays
MASSATREVLMLEAPPPSDPAAGPWRAVPEAEAIDALPYIDGDYGDAAVKREVDRLVEEEMRRGKRKPADFLRDLPPVPTAGFENHPMLAKEYERVRAGKPPFMLDMSRYGLEPPPMNKRNDVGAWRQALRNAQSQLQHQIIRIENLELMLKYGVDVWKLQNRQMESVLSRMQKMAVEYNERIENVNRERKFHQQNTGGQLHALKMEWQELCQKNIAIQAACVDLQNHIDQLKLEAKELGMPMDDNSGTDPQAS

SEQ ID NO: 11071 - DNA, 762 bp, Arabidopsis thaliana
  CDS (1)..(762)
atggcgacgaacaatggtgatgtcttgatgttggaggcgacgccggaggctgcgaggccctgggctagtgcggcgaatgcagaagttatcgatgcgcttccttatatagacgacgactatggcaatccattgattaagtcggaggtagaccgtttggtggaggaagagatgcgtcggagctctaagaagccagctgactttctaaaggacttgcctcctcttccgaagttcgattttaagaactgccctgttcttggcaaagagtatgagcgtgttagagctgggaagcctcctgtgcggatagatttcgaatcccgatacaaacttgaaatgccacctgccaataagaggaatgatgatgctgcctggaagcagtatcttcagaagaatcaacggtcattgcaacagaagctgattgagcttgagaatttggaattgatgtcaaaacttggccccgagctttggagacagaacaaccatcgccttgaagtatttttgaccagaatgcaaagactagcacaggagcagaatgaggaaattgaaaaagtaaatcgggaaaggaagtatcatcagcaaaccacatcatacgagctcaatgctctatctcaagaatggagacagctctgtgttaagaatatggagattcagtctgcttgtgccatgcttgagacacagatcgattcgttcaagaaagaagctgctgaaaggggttggaacttagaagagaaactagagaacgtcgagccacttcaaatgcaatga

SEQ ID NO: 11072 - protein, 253 aa, Arabidopsis thaliana
MATNNGDVLMLEATPEAARPWASAANAEVIDALPYIDDDYGNPLIKSEVDRLVEEEMRRSSKKPADFLKDLPPLPKFDFKNCPVLGKEYERVRAGKPPVRIDFESRYKLEMPPANKRNDDAAWKQYLQKNQRSLQQKLIELENLELMSKLGPELWRQNNHRLEVFLTRMQRLAQEQNEEIEKVNRERKYHQQTTSYELNALSQEWRQLCVKNMEIQSACAMLETQIDSFKKEAAERGWNLEEKLENVEPLQMQ

SEQ ID NO: 11073 - DNA, 660 bp, Aspergillus terreus NIH2624
  CDS (1)..(660)
atgcccataatcaacgaatcgcacgactcccttccctacatcgaccctgcgccgtccgcacgagctcgcgcagaagcagagaagctcgtcgccgccgagctcccggccgactactcatcgaccctccacccatcgatccccaacttcgaagagcccaaattctcgcctctcatccagcaagagctggagcgcaaggccgccggccagccgttgacagggggcattgacgtgtctcgctacgaagcaccggagccgccgacgcggtccgccgacgcgggtccaggcgcgactcccgacctggacgaatggcgccgcaccctgcagaaggcctacacggccagctcgcatctgtccatgcggcacgagaacctggcgctgctggaagaacacggcaagaacgcctggctgatcgggaacgcgcagctggaggatatcctgcgcgggctggagaaggagctggcggagacgaaggaggccgccgagtcggtcaacaagcagcgcaagatcgcccaggaggcgagcaagggcgagctggtcggcttggaggagacgtggaagaagggtgtcggcgctacgctggatgtggagctcgcggcggagacgctgcgtttgcagattcttgagcagaggcgtcagctcgcgcagcagcaggcccggtaa

SEQ ID NO: 11074 - protein, 219 aa, Aspergillus terreus NIH2624
MPIINESHDSLPYIDPAPSARARAEAEKLVAAELPADYSSTLHPSIPNFEEPKFSPLIQQELERKAAGQPLTGGIDVSRYEAPEPPTRSADAGPGATPDLDEWRRTLQKAYTASSHLSMRHENLALLEEHGKNAWLIGNAQLEDILRGLEKELAETKEAAESVNKQRKIAQEASKGELVGLEETWKKGVGATLDVELAAETLRLQILEQRRQLAQQQAR

SEQ ID NO: 11075 - DNA, 642 bp, Coccidioides immitis RS
  CDS (1)..(642)
atgtcgctaatcaacgagttccatgattccctgccgtacatcgacggtgaaattgctccagaagtccgcaccgaaatagacaagcttatcgctgccgaattaccagccgggcaccgaaccaccctccacccttcgattccaacgctcccagaaccaaagttctcagccctcatccagagcgagcttgagcgcaaggccaacagccgccccataactggcggagtagacctgtccagatacgaagccccagaagccccctcgaccgaagggaaggaccaagcaaccatcctgagcgattggcgcgagactctacgaaaagcgtacactgctagctcacatctaactgcaagacaagagaatctctctctgctggaggcccatggaaaaaatgcgtggttgattggtaatgcgcagctagaggagattctacgacaggtcgagaaggaaatacaggagacgaagcaggctacggatgaggtgaatagggagaggaagatgagacaggagaccgcgaggggcgagatcgagggcttagaggatgcctggaaacgcggtgttagcggaataattaacgtggagctcgccgcagagaaattgaggatggagatcctggaaaaaaggcggcagcaggcaaggtcttga

SEQ ID NO: 11076 - protein, 213 aa, Coccidioides immitis RS
MSLINEFHDSLPYIDGEIAPEVRTEIDKLIAAELPAGHRTTLHPSIPTLPEPKFSALIQSELERKANSRPITGGVDLSRYEAPEAPSTEGKDQATILSDWRETLRKAYTASSHLTARQENLSLLEAHGKNAWLIGNAQLEEILRQVEKEIQETKQATDEVNRERKMRQETARGEIEGLEDAWKRGVSGIINVELAAEKLRMEILEKRRQQARS

SEQ ID NO: 11077 - DNA, 651 bp, Neosartorya fischeri NRRL 181
  CDS (1)..(651)
atgcctgtcattaacgaatctcacgactccctcccttacatcgacgctgagccgtctgctcaagcacgcgccgctgcacagcaactcatcgcagcggaattatccccggaccatgcctcgactcttcaccccgccattcccgagctccccgaaccgcgattctccccccttatacagcaggagatcgaccgcaaggccgccgggttgcccttgaccgggggaatcgacctatcccgctacgaagcaccggagccgcctgcgcgctcgacagacggagaagttcctgatctggatgcatggcgccgcatcctgcagagagcgtacacggccagctcccatctctccatgcgacacgagaacctggcgctgctggaggagtacggcaagaacgcgtggctcattggcaactcccagctggaggatattctccggggtttggagaaggagttggccgagaccaaagaggcggcggaggcggtgaacaagcagaggaagctttcccaggaggccagccagggcgagatggtgagtctggaggagacttggaagcggggcgtcagtgccatcctcgacgtggaactggcctcggagggtctgcggttgcaaattctggagcagagacgtcggcttgctcagcagcaggcgcggtag

SEQ ID NO: 11078 - protein, 216 aa, Neosartorya fischeri NRRL 181
MPVINESHDSLPYIDAEPSAQARAAAQQLIAAELSPDHASTLHPAIPELPEPRFSPLIQQEIDRKAAGLPLTGGIDLSRYEAPEPPARSTDGEVPDLDAWRRILQRAYTASSHLSMRHENLALLEEYGKNAWLIGNSQLEDILRGLEKELAETKEAAEAVNKQRKLSQEASQGEMVSLEETWKRGVSAILDVELASEGLRLQILEQRRRLAQQQAR

SEQ ID NO: 11079 - DNA, 660 bp, Ajellomyces capsulatus NAm1
  CDS (1)..(660)
atgcctcttataaacgaattccacgattctctcccatacattgatgatgagcccaccgcgcaggctcgtgcgaatattgataaaattatatccgcagaaatggaccccaatcaccaatcaagcctccacccgtccatcccccctctacccgaagttcatttctctaccctgatgcagaaagagctggaccgaaaagaggctaacttgcctctaacgggcggcatcgacttgtcaagatacgaggctccagaagctccagaggataccttggcgtcagggaaagaacctgcacaggttctggatagctggcagcaaacactacgaagagcatatacctccagcactcatctatccacaagacaagagaacctgtctctactggatgcgcatgggaaaaatgcttggcttattggcaactctcaactagaagaaatcctacggcagattgaaaaggaactacaggaaaccaaggaagctaccgatgctatccataaagagaggaaaatgaggcaggaaacagcaaagggtgagcttgtggggttggaggatgcctggaaacgaggagttggcggcataatcgatgtggaggtggctgcagagaagctacggagggacattctcgagaagcgacgtcagcaatctcaaggacaggtacagtag

SEQ ID NO: 11080 - protein, 219 aa, Ajellomyces capsulatus NAm1
MPLINEFHDSLPYIDDEPTAQARANIDKIISAEMDPNHQSSLHPSIPPLPEVHFSTLMQKELDRKEANLPLTGGIDLSRYEAPEAPEDTLASGKEPAQVLDSWQQTLRRAYTSSTHLSTRQENLSLLDAHGKNAWLIGNSQLEEILRQIEKELQETKEATDAIHKERKMRQETAKGELVGLEDAWKRGVGGIIDVEVAAEKLRRDILEKRRQQSQGQVQ

SEQ ID NO: 11081 - DNA, 639 bp, Nematostella vectensis
  CDS (1)..(639)
atggcgtcgttccatgaggtcgccccagacgctttgccttactatgatcaaggttatgaagaaccaggagtacgggaaatggtaaatcagctagtggaagaagagacgagacgttatcgaccaacaaagaactacttggatttcctaccaacaccaaactatgatgtatttgtgactccagttctgaaaaatgaatttgacaggatcagtcgaaaacaaccaatggatctacttagtatgaaaagatatgaactgccacagcctgcctcatctcagaaacatgacataacagcatggacagaggctgtggataactccatggctcaactagaacatcaagcagaaagaataatcaacctggagatattatctaaatatgggcccagtgggtggagaacgcataacgaccttctgacgcgtatgctagaacagcaacagaagctcctgatgaacatacgcaaacaagtccaggaaattaactggaaaagaaagtcagaacagagtcaggcaggagtacagcttaagcaacttgagcaaagctgggttgggcttgtgacgaagaactatgaaatagagcgtgcatgcctgcaactagaagaggaagttgaacgattgaaacacacgaaaccacaaagatga

SEQ ID NO: 11082 - protein, 212 aa, Nematostella vectensis
MASFHEVAPDALPYYDQGYEEPGVREMVNQLVEEETRRYRPTKNYLDFLPTPNYDVFVTPVLKNEFDRISRKQPMDLLSMKRYELPQPASSQKHDITAWTEAVDNSMAQLEHQAERIINLEILSKYGPSGWRTHNDLLTRMLEQQQKLLMNIRKQVQEINWKRKSEQSQAGVQLKQLEQSWVGLVTKNYEIERACLQLEEEVERLKHTKPQR

SEQ ID NO: 11083 - DNA, 741 bp, Physcomitrella patens subsp. patens
  CDS (1)..(741)
atggggagtcccgatgttttgatgatcgaagcggccccaggcgcgaaagaaattgaacaagcgaagtggcggaatggagcgttggacgacactgtggacgccctgccgtatattgatcacgattacgcggatcctaaggtgaaggcggaagtggacaagatgattgctgaggagatgcggctgagctccaaaaagccttctgacttcctcgccgagctgcctcccgtgccttccatcaatgctcaggaccatccaatgcttgcaaaagagtttgaccgagtgcgagctggaaaagccccagttgccttagacctttcacgttacggtttagaacctcctccagtgaataagcgcaatgacgttggagcctggaagagcgctgttcaaaatgcaaaagctcaactacaacaccagactttgagacttgagaatctcgagctcatgctgaattatggcaccactgcatggatagttcataatcaacatcttgaagcttttcaagccaggctaagagatacagcactcgaatatcagcgtgagattgagatattgaatcgagagcgcaagcttaatcagcaagctgcggcggttgaattgaacttgttgagttcccaatggaaagaaatcagccaaaagaacttggacatagaagaagcttgtttgaaattggaagccgaggtcctcaaactccgcgaggaagctgaaaagaaaggaatagatcttactcaaccacctcagtag

SEQ ID NO: 11084 - protein, 246 aa, Physcomitrella patens subsp. patens
MGSPDVLMIEAAPGAKEIEQAKWRNGALDDTVDALPYIDHDYADPKVKAEVDKMIAEEMRLSSKKPSDFLAELPPVPSINAQDHPMLAKEFDRVRAGKAPVALDLSRYGLEPPPVNKRNDVGAWKSAVQNAKAQLQHQTLRLENLELMLNYGTTAWIVHNQHLEAFQARLRDTALEYQREIEILNRERKLNQQAAAVELNLLSSQWKEISQKNLDIEEACLKLEAEVLKLREEAEKKGIDLTQPPQ

SEQ ID NO: 11085 - DNA, 654 bp, Coprinopsis cinerea okayama7#130
  CDS (1)..(654)
atgtcgcaaggacctaattctgaaatcttcgacagtctaccgtactatgacgatgacctacaaaagtacccaaatctgaaatctaaagtcgaccaagaattggcgcgcgaattgaaagctttgaatccaaccgcggcgctccatccacgcgttcccccgcctgtagaactatttgctgatagaccgctgttgaaagcagagttggatcgagtcaaggccagccagccattcccatcgctcgacacattgcgctaccaactacctgcgccaacatccacaccggcaacggatgaggagtggaaggcagctcttgataatgcccgtgctcaattgcaacaccagcggatacggcagacaaatgggacgctccttcagacgtacggagcgaacgcctggagaattcagaattacctcctcgagtccacggtgaagcaggttgagagcttagccgaagagttgaagcagaagacggtagaggtgaacagggaaagaaagaacgaccaggaacgtctcggcaagcagttaacctcattggaaacacgttggacggagctgatttcaaacatcctgcaaatcgaaatggccaacatcgcgctggacgcagagattgaccgattgaatcaaaaggaagccgagctggcgcagcaaatatag

SEQ ID NO: 11086 - protein, 217 aa, Coprinopsis cinerea okayama7#130
MSQGPNSEIFDSLPYYDDDLQKYPNLKSKVDQELARELKALNPTAALHPRVPPPVELFADRPLLKAELDRVKASQPFPSLDTLRYQLPAPTSTPATDEEWKAALDNARAQLQHQRIRQTNGTLLQTYGANAWRIQNYLLESTVKQVESLAEELKQKTVEVNRERKNDQERLGKQLTSLETRWTELISNILQIEMANIALDAEIDRLNQKEAELAQQI

SEQ ID NO: 11087 - DNA, 654 bp, Laccaria bicolor S238N-H82
  CDS (1)..(654)
atggccacagaaacagtgtcctcatccttcacagaaatttacgattcccttccatattacgatgatgatttacagaaatttccagagttgaaagaaaaggtggaccgcgagatggctcgggaactggtccagcccacatctcttcaccccaacgtacctccacccattcaacttttttctaacaaccccttgctgaaggctgaactacaacgtgttgaagccagccaaccgtttccacctcttgattctctcagatatcagttacctgctcctacctcgacaccaggaacgatacaggaatggaaagaagctttggataatgcccacgctcagttgcaacatcaacgaatacgacaaaacaatttggcgctattgcaaacctatggtcccaatgcttggcggatacaaaactatctgctagaagagactaagaaacaaactgaaaaagcagctgaggaactggtgcaacttacggtagaggtcaatcgggaccgaaaaaatacgcaggatcgattcgggaaacaattgacgcagctggagacgcggtggacggaacttatctcgagcgtgttgcagattgaaatggcgaatgttgcattggatgctgagattaaccgactaaatcagcgagaagctgagctggctgagctatga

SEQ ID NO: 11088 - protein, 217 aa, Laccaria bicolor S238N-H82
MATETVSSSFTEIYDSLPYYDDDLQKFPELKEKVDREMARELVQPTSLHPNVPPPIQLFSNNPLLKAELQRVEASQPFPPLDSLRYQLPAPTSTPGTIQEWKEALDNAHAQLQHQRIRQNNLALLQTYGPNAWRIQNYLLEETKKQTEKAAEELVQLTVEVNRDRKNTQDRFGKQLTQLETRWTELISSVLQIEMANVALDAEINRLNQREAELAEL

SEQ ID NO: 11089 - DNA, 633 bp, Trichoplax adhaerens
  CDS (1)..(633)
atgtctaccgatgctttaccttattttgatcgagagtatgaagatgcatacattaaagagatggtacaccatctacttgaagaagaaacgaaacgttttcgaccttctaagaaatatttagagaatttaccaccaccgaatgatagcgccttcgtaacgcctattatgaaaaaagaatttgaaagaatagctgctaatcaacccatggatcttctcagtatgaaaaggtacgagttgcctcctcctcccgtaactcaaagaaatgacccgcatgcttggaaagaatgtgtagataattcttcggcgcaactagagcaccaggctgttaggattattaatttacaactattgacaaaatatggctctaattcatggcgggtctatatagaattactaaatgaaatgctaactaaccaaagaaaagaagtgcaaggattaacgagaaaaattcaagaaattaattggcaaagaaagaacgagcagacaaactgtggaagtgaattggctaacttagaagctagctggtttgctatggtgcgaaaaaattacgatattgagcaagcatgcttggaactcgaagcccaaattgacgcttctagcaaggaaatgggcactagagaacatagacaataa

SEQ ID NO: 11090 - protein, 210 aa, Trichoplax adhaerens
MSTDALPYFDREYEDAYIKEMVHHLLEEETKRFRPSKKYLENLPPPNDSAFVTPIMKKEFERIAANQPMDLLSMKRYELPPPPVTQRNDPHAWKECVDNSSAQLEHQAVRIINLQLLTKYGSNSWRVYIELLNEMLTNQRKEVQGLTRKIQEINWQRKNEQTNCGSELANLEASWFAMVRKNYDIEQACLELEAQIDASSKEMGTREHRQ

SEQ ID NO: 11091 - DNA, 687 bp, Ciona intestinalis
  CDS (1)..(687)
atggctggtgaagttacagtagatgctttaccttactttgataaaggctatgatgatcctggagtacgagaagcagcaactgcaatggttgaagaagaaacaagaagatatcgaccaacaagaaactatttgaactttttagctccacctaacatacatgcatttgaaaccgatataatgaaaaatgagtttgagcgattggaggcaagacaacctatggaacttcttagcatgcgtaggtatgatctcccaatcccaccaagtggtcaaaggaatgatatcactgcttgggaggaatgcgtaaaaaattctcatgctcagttgcagcatcaggatgttcgaatagaaaacttaaacttaatgctggaacatggaagcaacgcttggcgattatacaatgaacaattggttgcaatgcttcaggatgcacagaaacagttgcagagcataaaaaaagacattcaggatgtcaattgggaacgaaaatctgagcaaactaaagcaggggaaaagctgagaacattggaagcaaattgggttaatttagtgagcaaaaactatgaaattgaagaagccatatttcatttagaggttttggcaaagactgaaaatgcaaaaatggctcaatctcatgctgaaaacggaaaaatctcattaaaagttgctgaaaatggagaaatggagtag

SEQ ID NO: 11092 - protein, 228 aa, Ciona intestinalis
MAGEVTVDALPYFDKGYDDPGVREAATAMVEEETRRYRPTRNYLNFLAPPNIHAFETDIMKNEFERLEARQPMELLSMRRYDLPIPPSGQRNDITAWEECVKNSHAQLQHQDVRIENLNLMLEHGSNAWRLYNEQLVAMLQDAQKQLQSIKKDIQDVNWERKSEQTKAGEKLRTLEANWVNLVSKNYEIEEAIFHLEVLAKTENAKMAQSHAENGKISLKVAENGEME

SEQ ID NO: 11093 - DNA, 771 bp, Vitis vinifera
  CDS (1)..(771)
atggcgaacgacggcgacattctgatgctggaagcaccgccacaggcctcacgtccggcggaattcatcgacgccttgccgtacattgacgatgattatggccaccccaaggtcaaagaagaggtggatcgattggtcgaagatgagatgcgccggagctccaaaaagccctccgatttcctcaaagacctccctccgcttccccccttcggtttccacaatcaccccatgcttgctagagaatatgagcgtgtgagagcggggaagcctccagtggcacttgacatgtcacgatatggacttgaaatgcctcctatgaataaacggaatgatgaaactgcttggaaacacgcacttcagaaagctcagcgcctactgcaacatcaagtaattaggctggaaaatctggaactgatgtcaaaacatggtgctgatgtctggaaacagcacaaccaacgacttgaggcatacttgtccagaatgcaagcattggcaatggaacaaaatgaaaagattgaaactgtgaatcgtgaaaggaaatatcatcagcaaaatactgcctttgagcttaacgctttgtctgcacaatggaaggagctctgtgaaaaaaatattgaaattcgaacagcttgtgctaaaattgaaaataatattgaagaacttaggagagaagctgcagagagaggctggaatttggatgctaatatagataatggttctttatcacactcagaacagcaccagcagatccagaaaacattaaccaagtag

SEQ ID NO: 11094 - protein, 256 aa, Vitis vinifera
MANDGDILMLEAPPQASRPAEFIDALPYIDDDYGHPKVKEEVDRLVEDEMRRSSKKPSDFLKDLPPLPPFGFHNHPMLAREYERVRAGKPPVALDMSRYGLEMPPMNKRNDETAWKHALQKAQRLLQHQVIRLENLELMSKHGADVWKQHNQRLEAYLSRMQALAMEQNEKIETVNRERKYHQQNTAFELNALSAQWKELCEKNIEIRTACAKIENNIEELRREAAERGWNLDANIDNGSLSHSEQHQQIQKTLTK

SEQ ID NO: 11095 - DNA, 768 bp, Populus trichocarpa
  CDS (1)..(768)
atggcgacgagcaacagcgcgaacggtgacatgttgatgctagaagcagcaccagaggcctcacgtccctggtccacctcttccaatgctgaaataattgatgcactgccttacatcgacgacgattacggaaacccttctgtgaaagctgaagtcgatcgtcttgtcgaggaagagatgcgtcgaagctccaaaaaaccctcagatttcttaaaagaattgccacccgtccccaaattcactttcgagaattatccgatgcttgctaaagagtacgagagagtgagagcggggaggccgccggttacgctcgatttttcgaggtattctcatttggatttgccagctgcgaacaaaatgaatgacgagactgcttggaaacaggctcttcagcgtgcccaacgcttgctgcagcatcaagtaatcaggctggaaaacttggaactcatgtcaaaatatggtcctgaggtttggatacagcacaaccgacagttggaaacaatgctaaccagaacacaaaaattagcacgggaacaaaatgaaaagattgaagctgtgaaccgtgaaaggaaatatcatcagcaaaatactgcatatgagctgaatgctttatccgcacaatggaaggagctttgtcagaaaaatatagaaatccaagaggcatgtattaaaattgaaaatcagatagaggaacttaagagagaatcttcagagagaggctggaatgtggaagctaacatagaaaacggttccctgttgcattcataa

SEQ ID NO: 11096 - protein, 255 aa, Populus trichocarpa
MATSNSANGDMLMLEAAPEASRPWSTSSNAEIIDALPYIDDDYGNPSVKAEVDRLVEEEMRRSSKKPSDFLKELPPVPKFTFENYPMLAKEYERVRAGRPPVTLDFSRYSHLDLPAANKMNDETAWKQALQRAQRLLQHQVIRLENLELMSKYGPEVWIQHNRQLETMLTRTQKLAREQNEKIEAVNRERKYHQQNTAYELNALSAQWKELCQKNIEIQEACIKIENQIEELKRESSERGWNVEANIENGSLLHS

SEQ ID NO: 11097 - DNA, 654 bp, Anopheles gambiae str. PEST
  CDS (1)..(654)
atggccggtgaagtgttggttgatgcattgccgtacatcgatcttggctacgatgatcctggcgtgcgggaagcggccatcgccatggtggaggaagaatgtcgccgctatcggccgacgaaaaactatctcgagcatctgcccgccctcaacacgaccgcgttcgaaacggaactaatggcggccgaattcgagcgcatccaaaaccggctgccgatggaaccgctcagcatgaagcggtacgagctaccgccgcccccggccggcaagatgaacgaagtgtccgcctggagcgaaagcgtggacaattcgatggcccagctggagcatcaagcggtgcgcgccatgaacctcgagctaatggccgagtatgggtgcgagatgtggaagtcgtacctcgaaacgttggtcacgatgcaggccaagtgtcaggcccggctggcggaggtaaagaaggagatacaggacgtgaactgggcgcgcaagacgaaacaaacgcagggcggcgagaagctgcgcacgctggaagcgcagtgggtgatgctggtgtcgaagaactacgagatcgagcaggcttgcgccaagctggaggaacaaatctaccacaaaaagcggcaatcgagcgcactgcgagcggagggcagggctgaatga

SEQ ID NO: 11098 - protein, 217 aa, Anopheles gambiae str. PEST
MAGEVLVDALPYIDLGYDDPGVREAAIAMVEEECRRYRPTKNYLEHLPALNTTAFETELMAAEFERIQNRLPMEPLSMKRYELPPPPAGKMNEVSAWSESVDNSMAQLEHQAVRAMNLELMAEYGCEMWKSYLETLVTMQAKCQARLAEVKKEIQDVNWARKTKQTQGGEKLRTLEAQWVMLVSKNYEIEQACAKLEEQIYHKKRQSSALRAEGRAE

SEQ ID NO: 11099 - DNA, 756 bp, Apis mellifera
  CDS (1)..(756)
atggcaggagaagttgttgtcgatgctctaccatatattgatcaaggatatgacgaacctggagtcagagaagcggctttggctatggttgaagaagaaacacgtcgctatagaccaacgaaaaattatttagaacatttgacatcattaaatataactgcttttgaaacagaagtaatgaaacatgaatttgaacgaatgcaaaaccgtttacctatggaagtacttagtatgaaacgttatgaattacctccacctccaccaggtaaaatgaatgatcttgcagcatggaatgaaagtgtagaaaatagcagcgcacaattagaacatcaggctacaagaatttgtaatcttgaattaatgatggaatatggatgtgaagcatggaaatcttatttagaaatattagtacaattagtaaatcaagcccaaaaacaattacaagcattaagaaaaaagatacaagaagttaattggcaaagaaaatctatgcaaactcaaggaggagaaaagttaagagcattagaagcacaatgggtgggattagtatcaaaaaattatgagattgaacaagcatgtgtgcatttagaagaagaaatacaaaaatctatgatgaataagggtgaaggagtggaaatcaatgatgtaccaggagaggaagaacctgatgttccagaaaaaagtgcaacagaggttatggcaacagaaatggatcaacaagaacaagaaaatcaagaaccccagaacaatgtgtaa

SEQ ID NO: 11100 - protein, 251 aa, Apis mellifera
MAGEVVVDALPYIDQGYDEPGVREAALAMVEEETRRYRPTKNYLEHLTSLNITAFETEVMKHEFERMQNRLPMEVLSMKRYELPPPPPGKMNDLAAWNESVENSSAQLEHQATRICNLELMMEYGCEAWKSYLEILVQLVNQAQKQLQALRKKIQEVNWQRKSMQTQGGEKLRALEAQWVGLVSKNYEIEQACVHLEEEIQKSMMNKGEGVEINDVPGEEEPDVPEKSATEVMATEMDQQEQENQEPQNNV

SEQ ID NO: 11101 - DNA, 648 bp, Aspergillus nidulans FGSC A4
  CDS (1)..(648)
atgcctttggtcgatgaatctcacgactctctcccgtatatcgatgcaacgccgtctgctgaggctcgagcttacgcggagaagttgatcgcgtcggagctttcatcagattaccagacctcagtccatccctcaattcccgaatttcctgagcccaaattctcgcccttgatccagcaggaaatcgagcgaaaggcagctggtctgccattgactggaggaatcgatttagcgcgttacgaggcccctgagccacctactcgctccgcggattccgctcccaacctcgatgagtggcgacagacgctgcggagagcctacactgctagctctcacttgtcatcgcggcaggagaacctttcgcttcttgaagaaagcggcaaaaatgcgtggttgattggaaactcacagttggaggacatactgagggcgcttgaaaaggaactggcagagaccaaggaggcaacagagagtgtcaacaaacaacgaaagattgcacaagaatcttgtcagggagaaatcactgggctggaagagtcatggcgacgtggtgttggtgccattcttgatgtggaacttgccgccgaggatttgcgaatgaagattttggagcaaagacggcaacatgctcagcaacaggcacggtaa

SEQ ID NO: 11102 - protein, 215 aa, Aspergillus nidulans FGSC A4
MPLVDESHDSLPYIDATPSAEARAYAEKLIASELSSDYQTSVHPSIPEFPEPKFSPLIQQEIERKAAGLPLTGGIDLARYEAPEPPTRSADSAPNLDEWRQTLRRAYTASSHLSSRQENLSLLEESGKNAWLIGNSQLEDILRALEKELAETKEATESVNKQRKIAQESCQGEITGLEESWRRGVGAILDVELAAEDLRMKILEQRRQHAQQQAR

SEQ ID NO: 11103 - DNA, 651 bp, Aspergillus fumigatus Af293
  CDS (1)..(651)
atgcccatcattaacgaatctcacgactctctcccttacatcgacgctgagccgtctgctcaagcacgcgccgctgcacagcaactcatcgcagcggagttatcccccaaccatgcctcaactcttcaccccgccattcccgagctccccgaaccgcgattctccccccttatacagcaggagatcgaccgcaaggccgccgggttgcccttgaccgggggaatcgacctttcccgctacgaagcaccggagccgcctgcacgctcgacagacggagaagttcctgatctggatgcgtggcgccgcattctgcagagagcgtacatggccagctcccatctctccatgcgacacgagaacctggcgttgctggaggagtacggcaagaatgcgtggctcattggcaactcccagctggaggatattctccggggtttggagaaggagttggccgagaccaaggaggcggcggaggcggtgaacaagcagaggaagcttgcccaggaggccagccagggtgagatggtgagtctggaggagacttggaagcggggcgtcagtgccatcctcgacgtggaactggcctcggagggtctgcgactgcagattctggagcagaggcgccggcttgcccagcagcaggcgcggtag

SEQ ID NO: 11104 - protein, 216 aa, Aspergillus fumigatus Af293
MPIINESHDSLPYIDAEPSAQARAAAQQLIAAELSPNHASTLHPAIPELPEPRFSPLIQQEIDRKAAGLPLTGGIDLSRYEAPEPPARSTDGEVPDLDAWRRILQRAYMASSHLSMRHENLALLEEYGKNAWLIGNSQLEDILRGLEKELAETKEAAEAVNKQRKLAQEASQGEMVSLEETWKRGVSAILDVELASEGLRLQILEQRRRLAQQQAR

SEQ ID NO: 11105 - DNA, 840 bp, Ustilago maydis 521
  CDS (1)..(840)
atggcgagagcacgaggtggatgcgcatccgaaggctcagccgcctccaacgagcctgacacggcacaatcggcgtctgccgccaacaccttggctgccacatcgacgagcagcgaaaacggggacactgaaacgtctgcagctggtggtccatccaaagattcgttctcgtaccacgctgtcgaactggcacctactgatgcgctcccctacttcgaccgagaactcgaactgcagcctggccttcggtcgcgtgtcgatgctttaatagcagaagaacaagcgtccatgtctcccatctcttccacatcatcgcgtcttccgccggtatacgaacttttcagcacaagacccgatctacgcaccgaactcgaacgtgttgcttctggccaaccgtcaacacataccctcgatacccaccgctacacgctcccctcccccacctctggcgaagcagcatctctgtctgactggcaagcagctgtagactcagcacacgcccaactgggccatatggatgttcgaatgaaaaacatcgagctcctgaaaaagtacggaagcaacgcctggaggctgtccaatttccaacaggaacaaaacatccgtctgctatccgaacagctcgacttggtgaaagcagaaacaagcgagatcaacaggctgaggcagaagaaccacttggaggctggcggtaagctggccacgttgaacaaaagatggactgaactcatctcgagagggctccagctcgaggttgctaacatcaccacaagccaagaggtggatatgctgaaaagtaagaagcggaagctcgagacagagttgagcctgttggagtag

SEQ ID NO: 11106 - protein, 279 aa, Ustilago maydis 521
MARARGGCASEGSAASNEPDTAQSASAANTLAATSTSSENGDTETSAAGGPSKDSFSYHAVELAPTDALPYFDRELELQPGLRSRVDALIAEEQASMSPISSTSSRLPPVYELFSTRPDLRTELERVASGQPSTHTLDTHRYTLPSPTSGEAASLSDWQAAVDSAHAQLGHMDVRMKNIELLKKYGSNAWRLSNFQQEQNIRLLSEQLDLVKAETSEINRLRQKNHLEAGGKLATLNKRWTELISRGLQLEVANITTSQEVDMLKSKKRKLETELSLLE

SEQ ID NO: 11107 - DNA, 828 bp, Oryza sativa subsp. japonica
  CDS (1)..(828)
atggcgtcgtcgtcggggacgagggaggtgctcatgctggaggccccgccggcgccctccggggcgccgtggcgcgcgccgccggacgcggaggccgtggacgcgctgccctacatcgacggcgactacggcgacccggcggtgaagcgggaggtggaccggatggtggaggaggagatgcggcgcgggagccgcaagcccgccgacttcctccgcgacctcccccccgtccccgccatcgggttcgagaatcatcctatgcttgctaaagagtacgagcgtgttagagctgggaaacctcctgctaccatagagatgtcccgctatggtttggagccacccccagcgaacaagaggaatgatgttgctgcatggaggcaggctctaagaaatgctcagagccagctgcaccatcaaatcataaggatagagaatctggagcttatgctgaagtatggtgttgaggtttggaagcttcagaatagacaaatggaatcagttttgtctaggatgcaaaagatggctgtcgaatacaatgagaagatagaaactgtcaaccgcgagaggaaatttcaccagcgggtgttctacggcgggaacgccgggagggaggcgctggtggagatgtgcgccgacgagcacgtgcagcgccggacgttcgacagctacctgcacaagcggatggcgcccgccgagccgtggggggacctccgcctgctgtggcgcacggcggcggccatggtgcgctgcggcgtgctcggcagggaggtcgagcgcctccgccgtctcgagcagcaggccgccgaccaggtgctcctccgccattga

SEQ ID NO: 11108 - protein, 275 aa, Oryza sativa subsp. japonica
MASSSGTREVLMLEAPPAPSGAPWRAPPDAEAVDALPYIDGDYGDPAVKREVDRMVEEEMRRGSRKPADFLRDLPPVPAIGFENHPMLAKEYERVRAGKPPATIEMSRYGLEPPPANKRNDVAAWRQALRNAQSQLHHQIIRIENLELMLKYGVEVWKLQNRQMESVLSRMQKMAVEYNEKIETVNRERKFHQRVFYGGNAGREALVEMCADEHVQRRTFDSYLHKRMAPAEPWGDLRLLWRTAAAMVRCGVLGREVERLRRLEQQAADQVLLRH

SEQ ID NO: 11109 - DNA, 741 bp, Vitis vinifera
  CDS (1)..(741)
atggcgaacgacggcgacattctgatgctggaagcaccgccacaggcctcacgtccggcggaattcatcgacgccttgccgtacattgacgatgattatggccaccccaaggtcaaagaagaggtggatcgattggtcgaagatgagatgcgccggagctccaaaaagccctccgatttcctcaaagacctccctccgcttccccccttcggtttccacaatcaccccatgcttgctagagaatatgagcgtgtgagagcggggaagcctccagtggcacttgacatgtcacgatatggacttgaaatgcctcctatgaataaacggaatgatgaaactgcttggaaacacgcacttcagaaagctcagcgcctactgcaacatcaagtaattaggctggaaaatctggaactgatgtcaaaacatggtgctgatgtctggaaacagcacaaccaacgacttgaggcatacttgtccagaatgcaagcattggcaatggaacaaaatgaaaagattgaaactgtgaatcgtgaaaggaaatatcatcagcaaaatactgcctttgagcttaacgctttgtctgcacaatggaaggagctctgtgaaaaaaatattgaaattcgaacagcttgtgctaaaattgaaaataatattgaagaacttaggagagaagctgcagagagaggctggaatttggatgctaatatagataatggttctttatcacactcagaacagtaa

SEQ ID NO: 11110 - protein, 246 aa, Vitis vinifera
MANDGDILMLEAPPQASRPAEFIDALPYIDDDYGHPKVKEEVDRLVEDEMRRSSKKPSDFLKDLPPLPPFGFHNHPMLAREYERVRAGKPPVALDMSRYGLEMPPMNKRNDETAWKHALQKAQRLLQHQVIRLENLELMSKHGADVWKQHNQRLEAYLSRMQALAMEQNEKIETVNRERKYHQQNTAFELNALSAQWKELCEKNIEIRTACAKIENNIEELRREAAERGWNLDANIDNGSLSHSEQ

SEQ ID NO: 11111 - DNA, 726 bp, Picea sitchensis
  CDS (1)..(726)
atggggagcaaagagattttaatgctggaatctgcaccaggtgcgtcgcctccgaaatggagagctcgcgacacgggcgaatttattgacgctttgccttacatcgaccatgattatgcaaaccccaaggtaaaagccgaggtggacagaatggtggaggaagaaatgcgtagaagcaccaagaagcctgccgacttcctcgccgacctcccccctgctcccaagatcaacttcgagaactaccctatggtggcaaaggagtttgaacgtgtacgtgctggcaagcctcctcttacaatggacatgtctcgttatggtttagaaccaccccctctaaacaagcggaatgacgtgactgcctggaagaatgctctccataatgctcaaagtcaactacaacatcaaacaataaggcttgaaaatctagatctgatgatgaaacatggagtcaatgcatggaaagtccataatcaacatttggaagcatttttggcaaggatacaagccattggacgtgaacataatcaagagatagaggttttgaatcgtgaaagaaagttcaatcagcaagctgcagcagctgagctcaatcttttagaagcacaatggaaggaactttgtgaaaaaaatatagggattcaaactgcatgcgctgaacttgaaattaatatagaaaatatacagaaggaagccggggaaatggaattgattttggaacagaagtaa

SEQ ID NO: 11112 - protein, 241 aa, Picea sitchensis
MGSKEILMLESAPGASPPKWRARDTGEFIDALPYIDHDYANPKVKAEVDRMVEEEMRRSTKKPADFLADLPPAPKINFENYPMVAKEFERVRAGKPPLTMDMSRYGLEPPPLNKRNDVTAWKNALHNAQSQLQHQTIRLENLDLMMKHGVNAWKVHNQHLEAFLARIQAIGREHNQEIEVLNRERKFNQQAAAAELNLLEAQWKELCEKNIGIQTACAELEINIENIQKEAGEMELILEQK

SEQ ID NO: 11113 - DNA, 768 bp, Oryza sativa subsp. indica
  CDS (1)..(768)
atggcgtcgtcgtcggggacgagggaggtgctcatgctggaggccccgccggcgccctccggggcgccgtggcgcgcgccgccggacgcggaggccgtggacgcgctgccctacatcgacggcgactacggcgacccggcggtgaagcgggaggtggaccggatggtggaggaggagatgcggcgcgggagccgcaagcccgccgacttcctccgcgacctcccccccgtccccgccatcgggttcgagaatcatcctatgcttgctaaagagtacgagcgtgttagagctgggaaacctcctgctaccatagagatgtcccgctatggtttggagccacccccagcgaacaagaggaatgatgttgctgcatggaggcaggctctaagaaatgctcagagccagctgcaccatcaaatcataaggatagagaatctggagcttatgctgaagtatggtgttgaggtttggaagcttcagaatagacaaatggaatcagttttgtctaggatgcaaaagatggctgtcgaatacaatgagaagatagaaactgtcaaccgcgagaggaaatttcaccagcaaaacactggtggtcaactccatgccttgacgacggaatggcaggagctgtgtcagaaaaatatagctattcaagctgcatgtgttgatctgcagaatcagattgatcagcttaaacttggagctaaagaattgtactccccctctctccctactttcctccctctctctccacatccacatgactaa

SEQ ID NO: 11114 - protein, 255 aa, Oryza sativa subsp. indica
MASSSGTREVLMLEAPPAPSGAPWRAPPDAEAVDALPYIDGDYGDPAVKREVDRMVEEEMRRGSRKPADFLRDLPPVPAIGFENHPMLAKEYERVRAGKPPATIEMSRYGLEPPPANKRNDVAAWRQALRNAQSQLHHQIIRIENLELMLKYGVEVWKLQNRQMESVLSRMQKMAVEYNEKIETVNRERKFHQQNTGGQLHALTTEWQELCQKNIAIQAACVDLQNQIDQLKLGAKELYSPSLPTFLPLSPHPHD

SEQ ID NO: 11115 - DNA, 765 bp, Zea mays
  CDS (1)..(765)
atggcctcgtcggcgacgagagaggttctcatgcttgaggcgcctccgccgtccgaccccgctgcggggccctggcgcgcggtgccggacgcggaggccattgacgcgctgccctacatcgacggcgactacggcgatgcggcggtgaagcgggaggtcgatcgcctcgtcgaggaggagatgcgccgagggaagcgcaagcctgcagacttcctccgggacctgccccctgttcccaccgccggattcgagaatcatcctatgctttctaaagaatatgaacgtgttagggctggcaaacctccttttatgctagatatgtctcgctatggtttggagccacctccaatgaacaagaggaatgatgttggcgcttggaggcaggctctacggaatgctcagagccagttgcagcatcaaattataaggatagagaatctcgagcttatgctgaaatatggcgtagatgtttggaagctccagaacagacaaatggaatcagttctgtctaggatgcaaaagatggctgtagaatacaatgaaaggatagaaaatgtcaatcgcgagaggaagttccaccagcaaaatactggaggacagctgcatgccctgaaaatggaatggcaggagctgtgtcaaaaaaatatagctattcaggctgcttgtgttgacctgcagaatcatattgatcagcttaaacttgaagcaaaagaactgggaatgcccatggacgacaactcaggaaccgacccacaagcatcatga

SEQ ID NO: 11116 - protein, 254 aa, Zea mays
MASSATREVLMLEAPPPSDPAAGPWRAVPDAEAIDALPYIDGDYGDAAVKREVDRLVEEEMRRGKRKPADFLRDLPPVPTAGFENHPMLSKEYERVRAGKPPFMLDMSRYGLEPPPMNKRNDVGAWRQALRNAQSQLQHQIIRIENLELMLKYGVDVWKLQNRQMESVLSRMQKMAVEYNERIENVNRERKFHQQNTGGQLHALKMEWQELCQKNIAIQAACVDLQNHIDQLKLEAKELGMPMDDNSGTDPQAS

SEQ ID NO: 11117 - DNA, 816 bp, Oryza sativa subsp. japonica
  CDS (1)..(816)
atggcgtcgtcgtcggggacgagggaggtgctcatgctggaggccccgccggcgccctccggggcgccgtggcgcgcgccgccggacgcggaggccgtggacgcgctgccctacatcgacggcgactacggcgacccggcggtgaagcgggaggtggaccggatggtggaggaggagatgcggcgcgggagccgcaagcccgccgacttcctccgcgacctcccccccgtccccgccatcgggttcgagaatcatcctatgcttgctaaagagtacgagcgtgttagagctgggaaacctcctgctaccatagagatgtcccgctatggtttggagccacccccagcgaacaagaggaatgatgttgctgcatggaggcaggctctaagaaatgctcagagccagctgcaccatcaaatcataaggatagagaatctggagcttatgctgaagtatggtgttgaggtttggaagcttcagaatagacaaatggaatcagttttgtctagtaaagcacttattttgatatttgaagcacttatttcgacattcttgatgcaaaagatggctgtcgaatacaatgagaagatagaaactgtcaaccgcgagaggaaatttcaccagcaaaacactggtggtcaactccatgccttgacgacggaatggcaggagctgtgtcagaaaaatatagctattcaagctgcatgtgttgatctgcagaatcagattgatcagcttaaacttggagctaaagaattgggaatgcccatcgatgacagcaccggaactaatcagcaagcatcatcagccatttga

SEQ ID NO: 11118 - protein, 271 aa, Oryza sativa subsp. japonica
MASSSGTREVLMLEAPPAPSGAPWRAPPDAEAVDALPYIDGDYGDPAVKREVDRMVEEEMRRGSRKPADFLRDLPPVPAIGFENHPMLAKEYERVRAGKPPATIEMSRYGLEPPPANKRNDVAAWRQALRNAQSQLHHQIIRIENLELMLKYGVEVWKLQNRQMESVLSSKALILIFEALISTFLMQKMAVEYNEKIETVNRERKFHQQNTGGQLHALTTEWQELCQKNIAIQAACVDLQNQIDQLKLGAKELGMPIDDSTGTNQQASSAI

SEQ ID NO: 11119 - DNA, 654 bp, Coprinopsis cinerea
  CDS (1)..(654)
atgtcgcaaggacctaattctgaaatcttcgacagtctaccgtactatgacgatgacctacaaaagtacccaaatctgaaatctaaagtcgaccaagaattggcgcgcgaattgaaagctttgaatccaaccgcggcgctccatccacgcgttcccccgcctgtagaactatttgctgatagaccgctgttgaaagcagagttggatcgagtcaaggccagccagccattcccatcgctcgacacattgcgctaccaactacctgcgccaacatccacaccggcaacggatgaggagtggaaggcagctcttaataatgcccgtgctcaattgcaacaccagcggatacggcagacaaatgggacgctccttcagacgtacggagcgaacgcctggagaattcagaattacctcctcgggtccacggtgaagcaggttgagagcttagccgaagagttgaagcagaagacggtagaggtgaacagggaaagaaagaacgaccaggaacgtctcggcaagcagttaacctcattggaaacacgttggacggagctgatttcaaacatcctgcaaattgaaatggccaacatcgcgctggacgcagagattgaccgattgaatcaaaaggaagccgagctggcgcagcaaatatag

SEQ ID NO: 11120 - protein, 217 aa, Coprinopsis cinerea
MSQGPNSEIFDSLPYYDDDLQKYPNLKSKVDQELARELKALNPTAALHPRVPPPVELFADRPLLKAELDRVKASQPFPSLDTLRYQLPAPTSTPATDEEWKAALNNARAQLQHQRIRQTNGTLLQTYGANAWRIQNYLLGSTVKQVESLAEELKQKTVEVNRERKNDQERLGKQLTSLETRWTELISNILQIEMANIALDAEIDRLNQKEAELAQQI

SEQ ID NO: 11121 - DNA, 861 bp, Arabidopsis thaliana
  CDS (1)..(861)
atggcgacgaacaatggtgatgtcttgatgttggaggcgacgccggaggctgcgaggccctgggctagtgcggcgaatgcagaagttatcgatgcgcttccttatatagacgacgactatggcaatccattgattaagtcggaggtagaccgtttggtggaggaagagatgcgtcggagctctaagaagccagctgactttctaaaggacttgcctcctcttccgaagttcgattttaagctagggtttggaaattttgttggattagggtttaaagggaatttggtgaattccaatcttttggtttctgggttttacttcatcttggactttataggaaactgccctgttcttggcaaagagtatgagcgtgttagagctgggaagcctcctgtgcggatagatttcgaatcccgatacaaacttgaaatgccacctgccaataagaggaatgatgatgctgcctggaagcagtatcttcagaagaatcaacggtcattgcaacagaagctgattgagcttgagaatttggaattgatgtcaaaacttggccccgagctttggagacagaacaaccatcgccttgaagtatttttgaccagaatgcaaagactagcacaggagcagaatgaggaaattgaaaaagtaaatcgggaaaggaagtatcatcagcaaaccacatcatacgagctcaatgctctatctcaagaatggagacagctctgtgttaagaatatggagattcagtctgcttgtgccatgcttgagacacagatcgattcgttcaagaaagaagctgctgaaaggggttggaacttagaagagaaactagagaacgtcgagccacttcaaatgcaatga

SEQ ID NO: 11122 - protein, 286 aa, Arabidopsis thaliana
MATNNGDVLMLEATPEAARPWASAANAEVIDALPYIDDDYGNPLIKSEVDRLVEEEMRRSSKKPADFLKDLPPLPKFDFKLGFGNFVGLGFKGNLVNSNLLVSGFYFILDFIGNCPVLGKEYERVRAGKPPVRIDFESRYKLEMPPANKRNDDAAWKQYLQKNQRSLQQKLIELENLELMSKLGPELWRQNNHRLEVFLTRMQRLAQEQNEEIEKVNRERKYHQQTTSYELNALSQEWRQLCVKNMEIQSACAMLETQIDSFKKEAAERGWNLEEKLENVEPLQMQ

SEQ ID NO: 11123 - DNA, 762 bp, Brassica napus
  CDS (1)..(762)
atggcgacgaacaatggagacgtcttgatgctagaggcggcgccggaagcttcaaagccgtgggcgagcgcggcgaacgcagaagtaatcgacgcgcttccttatatcgacgacgactatggcaatccactgattaaggcggaggtcgaccgcttggtggaggaagagatgcgtcggagctcaaggaagcctgctgactttctcaaggagttgcctcctcttcccaagttcgatttcgagaactgcccagttctcggcaaagagtatgagcgtgttcgagctgggaagcctccagtgcggatcgattttgagtcccggtacaagcttgaattgccgcctgctagtaagaaaaatgatgatgctgcctggaagcagtatcttcagaagaatcaacggtcattgcaacagaagatgatcgagcttgagaatttggaaatgatgtcaaaacaaggccctgagctttggagacagaacaaccatcggcttgaagtattcttgaccagaatgcaaaaactagctcaggagcagaacgaagaaattgaaaaagtaaatcgtgaaaggaagtatcatcagcaaaccactgcgtacgagctcaatgctctatctcaagaatggaggcagctctgtgtgaagaatatggagattcaatctgcttgtgtcgtgctagagacaaaaatcgatgcgttcaaaaaggaagctgctgaaagaggatggaacttagaagagaaactagagagtgtcaagccgcttcaaccgcagtga

SEQ ID NO: 11124 - protein, 253 aa, Brassica napus
MATNNGDVLMLEAAPEASKPWASAANAEVIDALPYIDDDYGNPLIKAEVDRLVEEEMRRSSRKPADFLKELPPLPKFDFENCPVLGKEYERVRAGKPPVRIDFESRYKLELPPASKKNDDAAWKQYLQKNQRSLQQKMIELENLEMMSKQGPELWRQNNHRLEVFLTRMQKLAQEQNEEIEKVNRERKYHQQTTAYELNALSQEWRQLCVKNMEIQSACVVLETKIDAFKKEAAERGWNLEEKLESVKPLQPQ

SEQ ID NO: 11125 - DNA, 735 bp, Glycine max
  CDS (1)..(735)
atggcggatggaagcagcggggaaattctaatgctggaagccccagcgtcttacggtaggtctagcgattccgacgcggaaataatcgacgcattgccttatatcgacgacgactacgcagaccccagagtcaaactggaggttgaccgtctcgtggaggatgagatgcgtcgcagcaccaagaagcccaccgatttcctcaatgatttccctcctcttcccaactccattttccagaactacccaatgattgccagagagtacgaacgtgtgagagctggaaggcctcccgttgctcttgatagatcgcgctacgatttggaaatgccgccgcccaataaaaggaacgacgaaactgcttggaagcaagctcttcatagagctcaacgcctgctgcaatatcagatcatcaggatggaaaatttggacttgatgttaaaatatggtcccgatacctggaaacagcacaaccagagattggaagtatacttgtcaagaatgcagaaattagctcaggaacaaaatgaaaagattgaaaaagtaaaccgtgaaaggaaatatcatcagcaaaacactgcatatgagcttaatgcgttgtccatgcaatggaaggagctttgtcagaagaatatagacatcagtgctgcctgtgcttcagttgaaaatcgcataaatgaactcaaaagagaagcagcagaaagaggctggaacgtgggagctgtaacaggaaaatga

SEQ ID NO: 11126 - protein, 244 aa, Glycine max
MADGSSGEILMLEAPASYGRSSDSDAEIIDALPYIDDDYADPRVKLEVDRLVEDEMRRSTKKPTDFLNDFPPLPNSIFQNYPMIAREYERVRAGRPPVALDRSRYDLEMPPPNKRNDETAWKQALHRAQRLLQYQIIRMENLDLMLKYGPDTWKQHNQRLEVYLSRMQKLAQEQNEKIEKVNRERKYHQQNTAYELNALSMQWKELCQKNIDISAACASVENRINELKREAAERGWNVGAVTGK

SEQ ID NO: 11127 - DNA, 759 bp, Glycine max
  CDS (1)..(759)
atggcggatggaagcagcggggaaattctaatgctggaagccccagcgtcttacggtaggtctagcgattccgacgcggaaataatcgacgcattgccttatatcgacgacgactacgcagaccccagagtcaaactggaggttgaccgtctcgtggaggatgagatgcgtcgcagcaccaagaagcccaccgatttcctcaatgatttccctcctcttcccaactccattttccagaactacccaatgattgccagagagtacgaacgtgtgagagctggaaggcctcccgttgctcttgatagatcgcgctacgatttggaaatgccgccgcccaataaaaggaacgacgaaactgcttggaagcaagctcttcatagagctcaacgcctgctgcaatatcagatcatcaggatggaaaatttggacttgatgttaaaatatggtcccgatacctggaaacagcacaaccagagattggaagtatacttgtcaagaatgcagaaattagctcaggaacaaaatgaaaagattgaaaaagtaaaccgtgaaaggaaatatcatcagcaaaacactgcatatgagcttaatgcgttgtccatgcaatggaaggagctttgtcagaagaatatagacatcagtgctgcctgtgcttcagttgaaaatcgcataaatgaattgaaaagaggagcagcagaaagaggctggaacttggaagctgtaactgaaaatggccaattggcaaaatccgaattatga

SEQ ID NO: 11128 - protein, 252 aa, Glycine max
MADGSSGEILMLEAPASYGRSSDSDAEIIDALPYIDDDYADPRVKLEVDRLVEDEMRRSTKKPTDFLNDFPPLPNSIFQNYPMIAREYERVRAGRPPVALDRSRYDLEMPPPNKRNDETAWKQALHRAQRLLQYQIIRMENLDLMLKYGPDTWKQHNQRLEVYLSRMQKLAQEQNEKIEKVNRERKYHQQNTAYELNALSMQWKELCQKNIDISAACASVENRINELKRGAAERGWNLEAVTENGQLAKSEL

SEQ ID NO: 11129 - DNA, 771 bp, Hordeum vulgare
  CDS (1)..(771)
atggccttgccggcgactagggaggtgcttatgctggaggcaccaccgtccgaggctgcgggtgtgccttggcgcccgcctccggacgctgagacggtggacgcgctgccctacatcgacggggactacggcgacccggcggtgaagcgcgaggttgaccgcctcgtcgaggaggagatgcgccgcgctcaccgcaagcccgccgacttcctccgcgacctgcccccctatcccatcattggatttgagaatcatcctatgcttgcaaaagagtacgaacgtgttagagctggcaagccacctgctaccatagagatgtcccgctatggtttggagccacccccagcgaacaagaggaatgatgttgttgcttggaagcaggctttacggaatgcccagagccagctgcagcatcaaattgtacggattgagaatctggagcttatgctgaagcacggtgttgaggtttggaagctccagaacagaaaaatggaatcagttttgtctaggacgcaaaaaatgacactggaatacaatgaaaagatagaaactgtcaaccgtgagaggaaatttcatcagcaaaacaccggtggacaactccacgccttgacagtagaatggcaggaactgtgtcagaaaaacatagctattcaagctgcgtgtgttgatctgcagaatcaaattgatcagcttaaactggaagctaaagaacagggaatgccaatggctggtagcaatgaaactaacccacaagcatcagtagggatttga

SEQ ID NO: 11130 - protein, 256 aa, Hordeum vulgare
MALPATREVLMLEAPPSEAAGVPWRPPPDAETVDALPYIDGDYGDPAVKREVDRLVEEEMRRAHRKPADFLRDLPPYPIIGFENHPMLAKEYERVRAGKPPATIEMSRYGLEPPPANKRNDVVAWKQALRNAQSQLQHQIVRIENLELMLKHGVEVWKLQNRKMESVLSRTQKMTLEYNEKIETVNRERKFHQQNTGGQLHALTVEWQELCQKNIAIQAACVDLQNQIDQLKLEAKEQGMPMAGSNETNPQASVGI

SEQ ID NO: 11131 - DNA, 765 bp, Zea mays
  CDS (1)..(765)
atggcctcgtcggcgacgagagaggttctcatgcttgaggcgcctccgccgtccgaccccgctgcggggccctggcgcgcggtgccggacgcggaggccattgacgcgctgccctacatcgacggcgactacggcgatgcggcggtgaagcgggaggtcgatcgcctcgtcgaggaggagatgcgccgagggaagcgcaagcctgcagacttcctccgggacctgccccctgttcccaccgccggattcgagaatcatcctatgcttgctaaagaatatgaacgtgttagggctggcaaacctccttttatgctagatatgtctcgctatggtttggagccacctccaatgaacaagaggaatgatgttggcgcttggaggcaggctctacggaatgctcagagccagttgcagcatcaaattataaggatagagaatctcgagcttatgctgaaatatggcgtagatgtttggaagctccagaacagacaaatggaatcagttctgtctaggatgcaaaagatggctgtagaatacaatgaaaggatagaaaatgtcaatcgcgagaggaagttccaccagcaaaatactggaggacagctgcatgccctgaaaatggaatggcaggagctgtgtcaaaaaaatatagctattcaggctgcttgtgttgacctgcagaatcatattgaccagcttaaacttgaagcaaaagaactgggaatgcccatggacgacaactcaggaaccgacccacaagcatcatga

SEQ ID NO: 11132 - protein, 254 aa, Zea mays
MASSATREVLMLEAPPPSDPAAGPWRAVPDAEAIDALPYIDGDYGDAAVKREVDRLVEEEMRRGKRKPADFLRDLPPVPTAGFENHPMLAKEYERVRAGKPPFMLDMSRYGLEPPPMNKRNDVGAWRQALRNAQSQLQHQIIRIENLELMLKYGVDVWKLQNRQMESVLSRMQKMAVEYNERIENVNRERKFHQQNTGGQLHALKMEWQELCQKNIAIQAACVDLQNHIDQLKLEAKELGMPMDDNSGTDPQAS

SEQ ID NO: 11133 - DNA, 20 bp, Artificial sequence
  primer
atggcgacgagcaacagcgc

SEQ ID NO: 11134 - DNA, 20 bp, Artificial sequence
  primer
ttatgaatgcaacagggaac

SEQ ID NO: 11135 - protein, 260 aa, Artificial sequence
  consensus sequence
  Variant (2)..(3): Xaa in position 2 to 3 is any amino acid
  Variant (5)..(5): Xaa in position 5 is any amino acid
  Variant (11)..(27): Xaa in position 11 to 27 is any amino acid
  Variant (28)..(29): Xaa in position 28 to 29 is any or no amino acid
  Variant (31)..(40): Xaa in position 31 to 40 is any amino acid
  Variant (41)..(45): Xaa in position 41 to 45 is any or no amino acid
  Variant (47)..(48): Xaa in position 47 to 48 is any amino acid
  Variant (50)..(52): Xaa in position 50 to 52 is any amino acid
  Variant (54)..(54): Xaa in position 54 is any amino acid
  Variant (55)..(89): Xaa in position 55 to 89 is any or no amino acid
  Variant (91)..(94): Xaa in position 91 to 94 is any amino acid
  Variant (96)..(97): Xaa in position 96 to 97 is any amino acid
  Variant (99)..(100): Xaa in position 99 to 100 is any amino acid
  Variant (102)..(103): Xaa in position 102 to 103 is any amino acid
  Variant (105)..(111): Xaa in position 105 to 111 is any amino acid
  Variant (112)..(112): Xaa in position 112 is any or no amino acid
  Variant (115)..(118): Xaa in position 115 to 118 is any amino acid
  Variant (119)..(119): Xaa in position 119 is any or no amino acid
  Variant (121)..(128): Xaa in position 121 to 128 is any amino acid
  Variant (129)..(136): Xaa in position 129 to 136 is any or no amino acid
  Variant (138)..(140): Xaa in position 138 to 140 is any amino acid
  Variant (142)..(147): Xaa in position 142 to 147 is any amino acid
  Variant (149)..(149): Xaa in position 149 is any amino acid
  Variant (151)..(153): Xaa in position 151 to 153 is any amino acid
  Variant (155)..(156): Xaa in position 155 to 156 is any amino acid
  Variant (159)..(159): Xaa in position 159 is any amino acid
  Variant (161)..(164): Xaa in position 161 to 164 is any amino acid
  Variant (166)..(168): Xaa in position 166 to 168 is any amino acid
  Variant (170)..(172): Xaa in position 170 to 172 is any amino acid
  Variant (174)..(176): Xaa in position 174 to 176 is any amino acid
  Variant (178)..(179): Xaa in position 178 to 179 is any amino acid
  Variant (181)..(188): Xaa in position 181 to 188 is any amino acid
  Variant (189)..(203): Xaa in position 189 to 203 is any or no amino acid
  Variant (205)..(211): Xaa in position 205 to 211 is any amino acid
  Variant (214)..(215): Xaa in position 214 to 215 is any amino acid
  Variant (218)..(219): Xaa in position 218 to 219 is any amino acid
  Variant (221)..(226): Xaa in position 221 to 226 is any amino acid
  Variant (227)..(239): Xaa in position 227 to 239 is any or no amino acid
  Variant (241)..(242): Xaa in position 241 to 242 is any amino acid
  Variant (244)..(246): Xaa in position 244 to 246 is any amino acid
  Variant (248)..(259): Xaa in position 248 to 259 is any amino acid
EXXDXLPYIDXXXXXXXXXXXXXXXXXXXEXXXXXXXXXXXXXXXPXXPXXXFXXXXXXXXXXXXXXXXXXXXXXXXXXXXXXXXXXXXPXXXXEXXRXXAXXPXXXXXXXXRYXXXXXPXXXXXXXXXXXXXXXXWXXXLXXXXXXLXHXXXRXXNLXLXXXXGXXXWXXXNXXXEXXLXXXXXXXXXXXXXXXXXXXXXXXEXXXXXXXVNXXRKXXQXXXXXXXXXXXXXXXXXXXLXXLXXXWXXXXXXXXXXXXA

SEQ ID NO: 11136 - protein, 19 aa, Artificial sequence
  protein pattern
  Variant (2)..(6): Xaa in position 2 to 6 is any amino acid
  Variant (7)..(7): Xaa in position 7 is any or no amino acid
  Variant (9)..(9): Xaa in position 9 is any amino acid
  Variant (10)..(10): Xaa in position 10 is any or no amino acid
  Variant (12)..(12): Xaa in position 12 is Lys or Arg
  Variant (13)..(13): Xaa in position 13 is Asp, Glu or Gln
  Variant (16)..(17): Xaa in position 16 to 17 is any amino acid
  Variant (19)..(19): Xaa in position 19 is Asp, Glu, Gln or Arg
EXXXXXXEXXNXXRKXXQX

SEQ ID NO: 11137 - protein, 14 aa, Artificial sequence
  protein pattern
  Variant (2)..(3): Xaa in position 2 to 3 is any amino acid
  Variant (5)..(5): Xaa in position 5 is Ala or Ser
  Variant (9)..(9): Xaa in position 9 is any amino acid
  Variant (11)..(11): Xaa in position 11 is any amino acid
  Variant (12)..(12): Xaa in position 12 is Ala, Asp, Glu or Thr
  Variant (13)..(13): Xaa in position 13 is any amino acid
  Variant (14)..(14): Xaa in position 14 is Ala, Gly, Gln, Ser or Thr
EXXDXLPYXDXXXX

SEQ ID NO: 11138 - DNA, 1605 bp, Populus trichocarpa
  CDS (1)..(1605)
atggcagaccttcttgtagaacaaccccgagaaatcaccatctctaaaaccttccctacaaaaccaaagctaaaacccaaagctaaaaccccatcgaaaacccctgaatccaaatactggtcttccttcaaatcccaccaaatttcaaacctcatctcctccatcccttccatagatttctcacctatatccccacaccaatttgccgccgccaattccgcttccctcactctcttctcctcccaaacactctctcccacctccaagatctccttctccgatgttgtcacctcctgctccttccgctgcgacggctccctgatcgctgcctccgatctctccggccttattcgggtattcgatgtaaagacacgaacccctcttcgtcgcctgaagtcccatacgcgccctgttcgttttgttaagtacccgttactcgataagctacatttggtgtctggtggtgatgattctgttgttaagtactgggatgttgctggagagagtgtggtttcggacttgtatggtcacagggactatgcgaggtgtggtgattgctctccgattaatggagagatatttgttactgggtcttatgatcacacggtaaagctgtgggatgtgagggttgatagtaaggaatcagttatcgaagtgaatcatggaaagccagttgaggatgtgatttttttgccctcaggcggaatggttgcgactgcaggagggaatagtttgaagatatgggatttgattggaggagggaagatggtttattcgatggagagtcataacaagactgttacttctatttgtgtagggaaagtagggaaagagagtggagaggaggctttgcagtataggattttgagtgtggctttagatgggtatatgaaggtttttgattatgcaaaaatgaaggttactcattccatgaggtttcctgccccgcttatgtccattgggttttctccggattgtatgactagggtcattgggtcttccaatgggattatatttgctgggaggagaaaaggaaaggaggatgtgggagagagtaaatcagggaatttttgggcgctaggcagtgtagaggaaccacagaggcgggctttgaggccaacatattttaggtattttcataggagtcaaggggagaagccaaatgagggggatcatttgataatgaggccaaagaaggtgaaattgtcggagcatgataagttgttgaagaagtttaggcataaagaagcgctggtttcagttttgagtgggaagaatccagagaatgtggtggctgtgatggaggaaatggtggcaaggaggaagttattgaaatgcgttgtgaatttggatgaggaggagcttgggttgttgttgggtttcttgcataagcactcaactatgccaagacattcaggtttattgatgggcttgactaaaaaggtacttgaaatgcgggctgatgatattagagcttctgatgctttgaaaagtcatattagaaaccttaaaaggtcagttgaagaggagatcagaattcaacattcactacaagagatacagggtataatttctcctttattgagaattgccgggagaagatag

SEQ ID NO: 11139 - protein, 534 aa, Populus trichocarpa
MADLLVEQPREITISKTFPTKPKLKPKAKTPSKTPESKYWSSFKSHQISNLISSIPSIDFSPISPHQFAAANSASLTLFSSQTLSPTSKISFSDVVTSCSFRCDGSLIAASDLSGLIRVFDVKTRTPLRRLKSHTRPVRFVKYPLLDKLHLVSGGDDSVVKYWDVAGESVVSDLYGHRDYARCGDCSPINGEIFVTGSYDHTVKLWDVRVDSKESVIEVNHGKPVEDVIFLPSGGMVATAGGNSLKIWDLIGGGKMVYSMESHNKTVTSICVGKVGKESGEEALQYRILSVALDGYMKVFDYAKMKVTHSMRFPAPLMSIGFSPDCMTRVIGSSNGIIFAGRRKGKEDVGESKSGNFWALGSVEEPQRRALRPTYFRYFHRSQGEKPNEGDHLIMRPKKVKLSEHDKLLKKFRHKEALVSVLSGKNPENVVAVMEEMVARRKLLKCVVNLDEEELGLLLGFLHKHSTMPRHSGLLMGLTKKVLEMRADDIRASDALKSHIRNLKRSVEEEIRIQHSLQEIQGIISPLLRIAGRR

SEQ ID NO: 11140 - DNA, 1602 bp, Oryza sativa
  CDS (1)..(1602)
atggccgccgacacctccaagcccttcttcccggcggcgccgaaccccgccctcctcccctccggccgcaagccctcccgcctctccccggaggcctcctactggcgctccttccgcgcctccgagctcacccccgccaacgagttcaacgtcacccacctcgccttctccccctcgtcggcccccaccctcgccgcctcgttgtccacctccgtgctcctcttctccggcgacccgctctccccgctcccccgcatccccgcctcccaggacgtcgccttctccccgtccttccgctccgacggctccctcctcgccgtcggcgacaagaagggcgtcgtccgcgtcttccgcgccgacaagaagcagtcgtcgggcgcgctccgcacgctcacggcccacaccgccgagacccgcgtcgtccgctaccccgtcgccggcggcgacaaggtccacctcttcaccgccggcgacgacgcgctcctcgcctactgggacgtgccatccgagacgcccgtgttcgccgcccccgccgcccaccgcgactacatccgcgccggcgccgcgtcccccgccgaccacaacatcttcgccacgggctcgtacgaccgcatcgtcaaattgtgggacgcccgcatggggaagacgtcgacgctgtccttctcccatggcgaattggtggagagcgtgctgttcctgccgtccggcgggctgctggcgacagccggcgggaacgtcgtcaggatttgggatgtcattggtggcgggcggcttctccactcggtggagagccatgtcaagacggtgatggccctcgcgctcgccaagatgaccaacaccggcgagacgcggctgcttagcgcggggagtgatggttatgtcaagagctttgattatggcgagcttaagctcacgcactcgatgcgatatcctaaggaattgctttccttggcgtgctcgccgtgtgggacagtgctggttgctggatcttcaaagggcacaatttatatgggtaggaggaaaaagaagtcgacaggggaggacgaggaagagggtaagggtgttggtggtgagcttgattgggcaccaaccaagccggagaagcggcggttggcaccgtccaactataggtacttcctccgtggacaaaatgcgaaggctaaggaaggtgaccttgtgattgagaagcctaagaaggtgaaggttgctgaacacgataagttgctgaggaagttcaggcacaaggatgctctagtttcagcgttagctcgaaacaatccaaggagcatagtggcggtgatggaggagctagtttcaaggagaaagctggtcagatgcatcgagaacttggacacggaagaactcgttcttctcctgctgttcctgcaccgaaatgcaaccttgccaaggtatgccaggttcttgatgggggtggcaaacaaggtgctggagatgcgcgcggatgatatccgatcagatgagaacctaaggggttgtgttagaaatcttaagaggatggctgcagaggagattcagatacagcacacattgcaggggatccaagggatgatttcacccatgcttgcacttgccagtagatga

SEQ ID NO: 11141 - protein, 533 aa, Oryza sativa
MAADTSKPFFPAAPNPALLPSGRKPSRLSPEASYWRSFRASELTPANEFNVTHLAFSPSSAPTLAASLSTSVLLFSGDPLSPLPRIPASQDVAFSPSFRSDGSLLAVGDKKGVVRVFRADKKQSSGALRTLTAHTAETRVVRYPVAGGDKVHLFTAGDDALLAYWDVPSETPVFAAPAAHRDYIRAGAASPADHNIFATGSYDRIVKLWDARMGKTSTLSFSHGELVESVLFLPSGGLLATAGGNVVRIWDVIGGGRLLHSVESHVKTVMALALAKMTNTGETRLLSAGSDGYVKSFDYGELKLTHSMRYPKELLSLACSPCGTVLVAGSSKGTIYMGRRKKKSTGEDEEEGKGVGGELDWAPTKPEKRRLAPSNYRYFLRGQNAKAKEGDLVIEKPKKVKVAEHDKLLRKFRHKDALVSALARNNPRSIVAVMEELVSRRKLVRCIENLDTEELVLLLLFLHRNATLPRYARFLMGVANKVLEMRADDIRSDENLRGCVRNLKRMAAEEIQIQHTLQGIQGMISPMLALASR

SEQ ID NO: 11142 - DNA, 1596 bp, Glycine max
  CDS (1)..(1596)
atggaggaagcaagagttcagaagaacttcccggtgaagccgaagctgaaatcgatggccagaaccccaaagcaaacccctgaatcgaagtactggtcctccttcaagacccaacaaatccccaacctcatctccgtcccctccctcaccttctcccccacaccccctcactccttcgccgccgcacactccgcctccctcactctttacagctcccagaccctctcccccgctgccaccatctcctccttctccgacgccgtctcctgcgcctccttccgctccgactcccgcctcctggccgcctccgacctctccggccttgtccaggtcttcgacgtcaaatcccgcaccgccctccgccgcctcaagtctcatttccgccccgtccgcttcgtccacttcccccgcctcgacaagctccacctcatctctgccggcgacgacgccctcgtcaagctctgggacgtcgccgaggagaccccggtctccgagttcctcggccacaaggactatgtcaggtgcggagactcctcccctgtgaattctgaaatcttcgttacaggctcctatgaccatgtcgtcaggctctgggatgctagggttagggattcgaaatcgtcggtgcaggtgaaccacggcgcgcccgtggaggatgttgtgttcttgccgtccggagggatggttgcgacggcgggtgggaattcggttaaaatttgggacttgattggtggagggaagcttgtgtactccatggagagtcacaacaagactgtcacgtcgatttgtgtcgggagaattgggaaggattatggtgaagaatcatcgaatcagtttaggattatgagtgtggggttggatgggtacttgaaggtgtttgattatggatcattgaaggttacacattccatgaggttccccgcgcctcttttgtcggtcgcctactcgccagattgttccaccagggtgattgggacatccaatggagtgatctatgctagcaagaggaagatgaaggaaaaagagaaggaggaggaggagagtgaggctagcttggtttggagaactgctcctgtggagaatactgagaagaaagcggtgaggccttcgcattttaggtattttcatagagggcagggaaccaaaccgtctgagggggatttcttggttatgaagcccaagaagaagaagtgggctaagcacgacacgctgttgaacaagtttgagcatggagaggctctggtgtctgtgttgggaactatgaaccctgggcatgtggtggctgtgatggaggaattggtggctaggaagaaatttctcaagtgtgtctccaacttggatgtggagaagttggaactgctcttggaattcttgcataagtattgtaccatgcctagatattctagtttgttgatggggttcgccaagaaggttcttgaaatgagggcggatgatattagagcttctgattctgaagccatcaagagtcatatcataaatctcaagcgggctgttgcccaggagattcagattcaacagtcattgcaagagatacagggtataatttctcctttgttgaagattgctggaagatga

SEQ ID NO: 11143 - protein, 531 aa, Glycine max
MEEARVQKNFPVKPKLKSMARTPKQTPESKYWSSFKTQQIPNLISVPSLTFSPTPPHSFAAAHSASLTLYSSQTLSPAATISSFSDAVSCASFRSDSRLLAASDLSGLVQVFDVKSRTALRRLKSHFRPVRFVHFPRLDKLHLISAGDDALVKLWDVAEETPVSEFLGHKDYVRCGDSSPVNSEIFVTGSYDHVVRLWDARVRDSKSSVQVNHGAPVEDVVFLPSGGMVATAGGNSVKIWDLIGGGKLVYSMESHNKTVTSICVGRIGKDYGEESSNQFRIMSVGLDGYLKVFDYGSLKVTHSMRFPAPLLSVAYSPDCSTRVIGTSNGVIYASKRKMKEKEKEEEESEASLVWRTAPVENTEKKAVRPSHFRYFHRGQGTKPSEGDFLVMKPKKKKWAKHDTLLNKFEHGEALVSVLGTMNPGHVVAVMEELVARKKFLKCVSNLDVEKLELLLEFLHKYCTMPRYSSLLMGFAKKVLEMRADDIRASDSEAIKSHIINLKRAVAQEIQIQQSLQEIQGIISPLLKIAGR

SEQ ID NO: 11144 - DNA, 2116 bp, Pinus radiata
  CDS (116)..(1702)
agaagaggccacctaaaaccctagaagccagagactgcaaacctcataaaacctccaaagcgcgcaccaagaaaccccccgcagaagaagagcgcgagctttcgcattcgcatcaatggaggtggaacccaagaaggcgtccaagaccttcccggtgaagccgaagctgaagccgaagccgagaaccccttctggcaagaccccagaatccaagtactggtcctccttcaagaccacccaccccctcgacaacctctccttctccgtcccttccctcgccttctccccttcccctccccacctcctcgccgccgcccactccgccaccgtctccctcttctccccccaccgcaccaccatctcctccttctccgacgtcgtctcctccctctccttccgctccgacggccaactcctcgccgcctccgacctctccggcctcatccaggtcttcgacgtccgctcccgcaccccgctccgccgcctccgctcccacgcccgccctgtcaggttcgtccgctacccggtcctcgacaagctccacctggtgtccgggggcgatgacgccctcgtcaagtactgggacgtggctggggagagcgtggtgtcggagcttagagggcataaggactacgtccggtgcggggactgttcgcccgccgacgcgaattgcttcgtcaccgggtcttatgatcacgtggtgaagctctgggatgtgagggtgagagatgggaacagggcggcgacggaggtgaatcacgggtcgccggtgcaggatgtgatcttcttgccgtcggggagtttggtcgccactgcgggagggaatagcgtgaagatttgggacttgattggaggagggaggatggtttattcgatggagagtcacaacaagaccgtgacctccatttgtgtgggtacgatgggggcgcagcagagcggggaagaaggtgtgcagctgaggatcttgagcgttggtcttgacgggtatatgaaggtgtttgattattctagaatgaaggtcacacattcgatgaggttcccggcacctctgctgtcgatcgggttttcgccagatagcaacgtgagagccattgggacttcgaatggtattttgtatgtgggaaagagaaaggcgaaggaaaatgcggagggtggtgccaatggaatcttagggttgggcagtgtggaggagccgcggaggcgggtcttgaagccctcgttctataggtacttccacagaggtcagagtgagaagccatccgagggagattatttggttatgaggccgaagaaggtgaagttggctgagcatgataaactcttgaagaagttccagcataagaatgctctcatttcagttttaggtggaaatgatcctgaaaaggtggtggctgtgatggaggaattggtggctcggagggcactgctaaagtgcgtcctgaacttggatgcggatgaattgggtctgattttgacgttcttgcataagaactcgactgtgcctagatattcaagcttgttgctggggctggcgaagaaggttattgacttgaggctcgaagacataagagcatccgatgccttgaagggtcatattaggaacctcaagcgctcagttgatgaggagattcggatacaagaggggttgcaagagattcagggtatggtatctcctttactaaggattgcaggcagaagatagcgatagagttatactgcatgtactgaggtaaatgttttgattactccacccaattgcgttggttctctactttttccccttgagggatgaaatatgaggagattcggatacaagaggggttgcaagagattcagggtatggtatctcctttactaaggattgcaggcagaagatagcgatagagttatactgcatgtactgaggtaaatgttttgattactccacccaattgcgttggttctctactttttccccttgagggatgaaattttgctgcaatgtatgagtttcactaaatttatggaacacttatgtttttatacggagatggttggagttgaaggtccatcttccgggttttatctgtaactggatgctcaagtaaaacaattttttttccctttaaaaaaaaaa

SEQ ID NO: 11145 - protein, 528 aa, Pinus radiata
MEVEPKKASKTFPVKPKLKPKPRTPSGKTPESKYWSSFKTTHPLDNLSFSVPSLAFSPSPPHLLAAAHSATVSLFSPHRTTISSFSDVVSSLSFRSDGQLLAASDLSGLIQVFDVRSRTPLRRLRSHARPVRFVRYPVLDKLHLVSGGDDALVKYWDVAGESVVSELRGHKDYVRCGDCSPADANCFVTGSYDHVVKLWDVRVRDGNRAATEVNHGSPVQDVIFLPSGSLVATAGGNSVKIWDLIGGGRMVYSMESHNKTVTSICVGTMGAQQSGEEGVQLRILSVGLDGYMKVFDYSRMKVTHSMRFPAPLLSIGFSPDSNVRAIGTSNGILYVGKRKAKENAEGGANGILGLGSVEEPRRRVLKPSFYRYFHRGQSEKPSEGDYLVMRPKKVKLAEHDKLLKKFQHKNALISVLGGNDPEKVVAVMEELVARRALLKCVLNLDADELGLILTFLHKNSTVPRYSSLLLGLAKKVIDLRLEDIRASDALKGHIRNLKRSVDEEIRIQEGLQEIQGMVSPLLRIAGRR

SEQ ID NO: 11146 - DNA, 1614 bp, Zea mays
  CDS (1)..(1614)
atggccgctgacacttcgaagcccttcttcccggcggcgccgcactcggctctccgcccctccaggagcgccgcctcgcgcgcgttccctgagagctcctactggcgcgccttccgctcctcggagctcgtgtccgacgccggcttccccgtcaccgatctcaccttcgcctcctctgtggaagacagagctgcccctaccctcgccgcttcctggtccacctccgtgcacgtcttctcctccgaccccctcgagaagctccgtaggatctctgtcgcgggcgatctcgccttctccccgtccttccgctgcgacggcgccctcctcgccaccggagacaagaagggtgtcgtccgcgtattccgcgccgacaaggccgccacgggggccctccgcacgctgcgcgcccacgccgccgagacccgcgtggtccggtacccagtcgctggcggcgacaagcttcacctcctcaccgccggcgacgacgcgctcctcgcctactgggacgtgccctcggagactcccgtcttctccatccccgccgcgcaccaggactacattcgcggcggtgcggcctcccctgctgatcacaacattttcgccactggctcttacgaccgcagcgtcaaattgtgggatgcccgcaccagcaataccggcccatctttgtccttctcccacggggaattggtggaaagcgtgctattccttccgtccggcgggctgctggccacggccggagggaacgtggtcaagatttgggacgtcattggtggtggctggctcgtgcactctgtggagagccatgtcaagacagtgatggacctgactcttggcaagatggtcaacactggggagatgcggctgcttagtgcgggcattgatgggtatgtgaagagctttgattttgggaagcttaagatgacacactccttgcggtaccctcagccgctcctttctgtggctgtctcgccctgtgggtctgtggtggtggcagggtctgcgaaagggaagatttatatgagaaataggaagaagaaggctgtggatgaggaagagcaagggatgaaatctgttggtggtgcgattgactgggtatctccagagccggagaagtcagtgttgaggccaaattactttaggtacttccgccgtgggcagaatgagaaggcaaaggagggtgactttgtgattgagaagccgaagaaggtgaaatatgcagagcatgataagttactgagaaagttcaggcacaaggatgctctggtttcagcattggtcaagaacaacccgaggagtgttgtggctgttatggaggagctggtttcaagaagaaagctcataagatgcatcgggaatttggataatgaggaacttggtcttcttttggagttccttcaccggaatgcaactttgccaaggtatgctaagttgttgttgtgtttggcaaacaaggttgtggagatgcgcgaggctgatatccgatcagatgagaagctgaaggtgcatatgaggaatcttaagagaatggttgcagaggagattcagatacagcacatgctgcagggcattcaagggatgatttcaccaatgcttgcacttgcaaccagatga

SEQ ID NO: 11147 - protein, 537 aa, Zea mays
MAADTSKPFFPAAPHSALRPSRSAASRAFPESSYWRAFRSSELVSDAGFPVTDLTFASSVEDRAAPTLAASWSTSVHVFSSDPLEKLRRISVAGDLAFSPSFRCDGALLATGDKKGVVRVFRADKAATGALRTLRAHAAETRVVRYPVAGGDKLHLLTAGDDALLAYWDVPSETPVFSIPAAHQDYIRGGAASPADHNIFATGSYDRSVKLWDARTSNTGPSLSFSHGELVESVLFLPSGGLLATAGGNVVKIWDVIGGGWLVHSVESHVKTVMDLTLGKMVNTGEMRLLSAGIDGYVKSFDFGKLKMTHSLRYPQPLLSVAVSPCGSVVVAGSAKGKIYMRNRKKKAVDEEEQGMKSVGGAIDWVSPEPEKSVLRPNYFRYFRRGQNEKAKEGDFVIEKPKKVKYAEHDKLLRKFRHKDALVSALVKNNPRSVVAVMEELVSRRKLIRCIGNLDNEELGLLLEFLHRNATLPRYAKLLLCLANKVVEMREADIRSDEKLKVHMRNLKRMVAEEIQIQHMLQGIQGMISPMLALATR

SEQ ID NO: 11148 - DNA, 1542 bp, Saccharomyces cerevisiae
  CDS (1)..(1542)
atgtcgactgctaggcctagaataatcacttcgaaggctccattattgcctcaacagactaccccggagcagcgttactggcgtcaatacacttccgcacaactggttaaagaacataatagcgttactcacatatcattcaatcctcaacatcctcatgattttgcagtaacttcctcaaccagagttcaaatattttcttcaagaactaggcaagtgatcaagaccttttcaagatttaaagatgttgtctattctgcatcctttaggagtgatggtaaattgctttgtgccggtgatgctaccggtttagtgtctgtatacgacagttataatcccaggactatccttttatctataaacgcttccacacatcccacacatgttacgaaattccatacgcaagataacaaaattctggctacggcgagtgacgatagagtgacaagactttgggatatatccaacgcatatgagccacaattagagctcaccggagctactgactatgttcgtaccttatcatttatcccagcagccccacatttggttgcaacaggctcatacgacggtttgatcagattatatgacacaagatctagcggatccacgccaatttattctctgaatcatgaccaacctgttgaaaatgttattgcagtatctccaacccaaattgtttcttgcggtggcaataatttcaaagtgtgggacttgaccagtaacaagaaattatacgaacgtggcaatttcaataaggctgtgacatgcttggactatgttgaaaattttgattctccaatgcaatcggcgttgatcgcttcttccttagatggtcatgtcaaagtctttgatcctttagacaatttccaagtcaaatttggctggaaattttcgggtcccgtactaagttgtgctgtctcccctagtaccgcacaagggaataggcatttagtagcaggtttatcatcaggactactagccattagaactaaaaagaaagagaaacgttcttccgataaagaaaacgcacccgccagttttaataagaatgcgaaaagtaataacttccagagaatgatgcgaggctcggaataccaaggtgatcaagagcatataatccacaatgataaggtaagatctcaacgtcgtatgcgtgcattcgaaaggaacataaatcagtttaaatggagcgaagcactcgacaatgcctttgtaccaggtatggccaaagagttgacacttactgttcttcaagaactacgcaaacgtggcaaagttcgtgtagcgctatatggtagagatgaatctacattagagccgctactgaattggtgcttaaaaggtattgaagatgtgagatcagcatctattgtagcggattgggtcgccgtggttttagaattatatgggaatacgttagaaagctctccagttcttcaagaattgatgatagatttgaaaactaaagttagacatgaaattcataagtctaaagaagctcaaagaattgaaggtatgcttcaacttttaacgagttaa

SEQ ID NO: 11149 - protein, 513 aa, Saccharomyces cerevisiae
MSTARPRIITSKAPLLPQQTTPEQRYWRQYTSAQLVKEHNSVTHISFNPQHPHDFAVTSSTRVQIFSSRTRQVIKTFSRFKDVVYSASFRSDGKLLCAGDATGLVSVYDSYNPRTILLSINASTHPTHVTKFHTQDNKILATASDDRVTRLWDISNAYEPQLELTGATDYVRTLSFIPAAPHLVATGSYDGLIRLYDTRSSGSTPIYSLNHDQPVENVIAVSPTQIVSCGGNNFKVWDLTSNKKLYERGNFNKAVTCLDYVENFDSPMQSALIASSLDGHVKVFDPLDNFQVKFGWKFSGPVLSCAVSPSTAQGNRHLVAGLSSGLLAIRTKKKEKRSSDKENAPASFNKNAKSNNFQRMMRGSEYQGDQEHIIHNDKVRSQRRMRAFERNINQFKWSEALDNAFVPGMAKELTLTVLQELRKRGKVRVALYGRDESTLEPLLNWCLKGIEDVRSASIVADWVAVVLELYGNTLESSPVLQELMIDLKTKVRHEIHKSKEAQRIEGMLQLLTS

SEQ ID NO: 11150 - DNA, 1593 bp, Arabidopsis thaliana
  CDS (1)..(1593)
atggaggaagagcttcgtgttcggctgaatgaccatcaagtgtcaaaggttttccctgtgaagcccaaatcaacggcgaaacctgtttccgaatcggagactccggaatcgaggtactggtcctccttcaaaaatcattccacacctaatctcgtctcctccgtagccgctttggctttctctccggtccaccctcactccttggccgtcgctcactccgccaccgtctccctcttttcctcgcagtcgctttcctcctcccgccgtttctccttccgcgatgttgtctcctccgtctgtttccgttccgacggagctcttttcgcggcatgcgatctctccggtgtggtccaggtcttcgacatcaaggaacgaatggctctccgtactctccgctcccacagcgcccccgctcgattcgtcaagtatccagttcaggacaagctccacttggtctccggaggcgacgatggagtcgtcaagtactgggatgtcgccggagcaacagtcatctcagatctgctaggccacaaggattatgtccgctgcggtgattgctcgcccgtcaacgattcaatgttggtaacaggctcttacgatcacacggtgaaggtgtgggacgccagagtccacacgtccaattggattgccgagatcaaccacggactcccagtggaggacgtcgtatacctgccttccggtggattgatcgcaaccgctggtggcaacagcgtcaaggtatgggatttgatcggaggcgggaagatggtttgctccatggagagtcacaacaagaccgtcacgtctctccgcgttgcgagaatggaatcggctgagagtcgacttgtgagcgttgctttggacggatacatgaaagtcttcgattacgggagagcaaaggtgacttactctatgaggtttcctgctcctctcatgtctcttggcctttcccccgatggttccactcgggtaatcggagggtctaatggcatggtgtttgccggtaagaagaaggtgagagatgttgttggaggacagaagaaaagtttgaatctctggagtctgataagcgatgtggatgagagtaggagaagggcactgaggcctacgtatttcaggtacttccagagagggcagagcgagaagccatccaaagatgattacttggtcaaggagaagaaaggattgaagctgacgagacacgataagctcttgaagaagttcaggcataaggaagctctggtctcggtgttggaggagaagaaaccggccaatgttgtggcagtgatggaagaattagtggcgaggaggaagctgatgaagtgcgtgtcgaatatggaggaaggcgagttgggaatgctgctaggcttcttacaaaggtactgcactgtgcagaggtattcaggattgttgatgggattgacgaagaaggttttggagacgagagctgaagacatcaagggtaaaaacgagtttaaagggcttctcaggaacttgaagagggaggttaatcaggagattaggatacaacagtctcttctagagattcagggtgttattgctcctttgatgagaattgcgggtagaagttga

SEQ ID NO: 11151 - protein, 530 aa, Arabidopsis thaliana
MEEELRVRLNDHQVSKVFPVKPKSTAKPVSESETPESRYWSSFKNHSTPNLVSSVAALAFSPVHPHSLAVAHSATVSLFSSQSLSSSRRFSFRDVVSSVCFRSDGALFAACDLSGVVQVFDIKERMALRTLRSHSAPARFVKYPVQDKLHLVSGGDDGVVKYWDVAGATVISDLLGHKDYVRCGDCSPVNDSMLVTGSYDHTVKVWDARVHTSNWIAEINHGLPVEDVVYLPSGGLIATAGGNSVKVWDLIGGGKMVCSMESHNKTVTSLRVARMESAESRLVSVALDGYMKVFDYGRAKVTYSMRFPAPLMSLGLSPDGSTRVIGGSNGMVFAGKKKVRDVVGGQKKSLNLWSLISDVDESRRRALRPTYFRYFQRGQSEKPSKDDYLVKEKKGLKLTRHDKLLKKFRHKEALVSVLEEKKPANVVAVMEELVARRKLMKCVSNMEEGELGMLLGFLQRYCTVQRYSGLLMGLTKKVLETRAEDIKGKNEFKGLLRNLKREVNQEIRIQQSLLEIQGVIAPLMRIAGRS

SEQ ID NO: 11152 - DNA, 1608 bp, Drosophila melanogaster
  CDS (1)..(1608)
atgcagaactcctttcttccactgaacacacggcgttttcgacagcgggcccaggtggaaacgccggatacggtgtactgggaccgactggcgaaaccagaactactcaaggagcacaacaccatcgattatttggacttcagtccaagcgatcctgacaactttgttgtgacctgttcggtgcgcgttcagatttacaacctggtgaccatgcttgtggtaaagaacctttcccgattccaaaagaccgcatacggcgccaccttccggcaggatggtcgactcctggccgccggcgacgaggagggccatgtcaagctattcgacaccaccagtcgcaacatcttgcgtttgttcaagggacacacggcaccagtacaccgcaccttctttacggcggacaagctgcagctagccagttttggagacgacaagtcggtccgtctgtgggacgtggcaaacgagaaggtggtgcaaacgtacgaggacacgcacaccgactacgttcgtgcaggcgccatgcatccgcaggcagggcatatgttcgtctccggcggctacgatggcaagatcaaactgtacgatacgagagcggaaacggcggtgcagcgcaccttagatcacggagctccggtggagtccatgttgttccttccgaacggctctattttcgtcagcgccggcggcagccaggtgcgcgtatgggatctcatcagcggctgccgtctgctcaccatgatgtcgcagcatcacaaaacagtaacttgtctgcgactgggatccgatggcaggagattgctctcaggcgggctcgataggcacgtgaaaatctacgatgtgagcacctacaaaacagtgcacacattgacttatcccaatgcggtggtcagcatggctgttgctgacggagatcaagcagttgtggctggaatggtcgatggtctagtctccattcgtcgcatgatggtagacagcaagcccagtcatttgaaaaagattcgtgcggatcgcgctcgaaagtacttcgtgagtacgaaacgcacgaacaacacccaagaggttgatcacaccatcaaggaccacgtcaaggggcctggattgaaatcctacgatgtgcacttgcgccagtttaaccacaagaaggctttggacgacgtgatgaatgcgcagaagatgcaataccagccggagctcattgtggctgtcatcacggaccttctgcaccgtggatcactgggaaaagccctcacgggtcgtcatgaggcagcgcttgtccgattcatcgacttcatttgcaaccacttgggcgaggtgcgattcatgcgcccgctgatgatggccgcgagcacggtccttgatgtcttcgagcaacgattggtggcctacagccagaagctgatgaaagccttgcaacgattgtcacttgcaatgcaggaggaggtgaggctcaccgccgagctgatgcggatgaagggtgctgtggatatgctcattgggatttcaatggacaatagcgaggtagcccataagcccacctatgtggagacaaagacacctaagatgcatccctccgtggcggcgcaaaattatgtggtcttagttgagtaa

SEQ ID NO: 11153 - protein, 535 aa, Drosophila melanogaster
MQNSFLPLNTRRFRQRAQVETPDTVYWDRLAKPELLKEHNTIDYLDFSPSDPDNFVVTCSVRVQIYNLVTMLVVKNLSRFQKTAYGATFRQDGRLLAAGDEEGHVKLFDTTSRNILRLFKGHTAPVHRTFFTADKLQLASFGDDKSVRLWDVANEKVVQTYEDTHTDYVRAGAMHPQAGHMFVSGGYDGKIKLYDTRAETAVQRTLDHGAPVESMLFLPNGSIFVSAGGSQVRVWDLISGCRLLTMMSQHHKTVTCLRLGSDGRRLLSGGLDRHVKIYDVSTYKTVHTLTYPNAVVSMAVADGDQAVVAGMVDGLVSIRRMMVDSKPSHLKKIRADRARKYFVSTKRTNNTQEVDHTIKDHVKGPGLKSYDVHLRQFNHKKALDDVMNAQKMQYQPELIVAVITDLLHRGSLGKALTGRHEAALVRFIDFICNHLGEVRFMRPLMMAASTVLDVFEQRLVAYSQKLMKALQRLSLAMQEEVRLTAELMRMKGAVDMLIGISMDNSEVAHKPTYVETKTPKMHPSVAAQNYVVLVE

SEQ ID NO: 11154 - DNA, 1485 bp, Schizosaccharomyces pombe
  CDS (1)..(1485)
atgtccgcgcctgctggtagacttcaacctcagcgttttgctgctttacctaatcccgttactgctgaaaataaattttggcggtcattcaaggttcctgtcgttgccaaggaatatagtgctatcactagtattcatttttccgctgaatccccttatgactttgcagtaactagtggggctcgtgtacaaatttatggagctagttcaaggtctgttaaaaaaacaattgctcgatttaaggataccgcatattctggtaacattagaaaggatggaaaacttttgcttgcaggagatgctacaggacttgtacagatatttgatttgtcaactcggagtattttgcgtgctttagacgctcatcagtttccagttcatgttacacaattttgtccttatgccaataccacgtttctctctggatccgatgacaaaactgtaaaggtctgggacttgtcaactggtgccgttcagtatgatctttctggacatgaagattatgttcgtactgcttcatggatgagtgctactagacttgtgagtggtggatatgatggtacaattcgtttatgggatactcgaattgcggacccagaagtaatgtctttttcgcatggtgaagcgattgacgttgtgcttccaatgcaatctggtagcactgttatttcagctggtggaccatccattaaagtttgggatttagtggctggaagacaaacacctacgaagaagctgtctaatcatcaaaagagtatcacatgccttgccatgaactccgagaatactagacttttgagtggtggtttagacggacatgtgaaaatttataacatctccgattggaaagttgtccatggcatgaaatattctggccctattttatctatgggactttctccggatagctgcaatttagttgtgggtatgtcgaacggtacattatcgcaacggactcgacgtataaccaagcaaacgagctcaaaaactcctttcttagggggcgtcggaagtgcttttggtgtagtaggtaaaaagaaacaaatctataagggcgagaacgatgaattttatgtcgaagaggctagacgtaaaagacttcgtcctttcgacaaagctttaaaatcattttgttactctgatgctttggatatggtattggagaacggatcacctgttcttatcataactatgcttattgagcttcttcatgttggagggttacggattgcattgtctaacagagatgatttatctcttactcctttgataaacttcttaagaaaatatataagagaccctcgtttctccgaaactttatgtatagttactagcaccattttagatatatacggagctgctcttgggggcagcgtaatggtggaaaatgcaatttcaaagcttcgtgaaaaagttgagcaggaagtagcggttactcaaagggcaaatgagttggttggtatgcttcagatgttgtctgcttga

SEQ ID NO: 11155 - protein, 494 aa, Schizosaccharomyces pombe
MSAPAGRLQPQRFAALPNPVTAENKFWRSFKVPVVAKEYSAITSIHFSAESPYDFAVTSGARVQIYGASSRSVKKTIARFKDTAYSGNIRKDGKLLLAGDATGLVQIFDLSTRSILRALDAHQFPVHVTQFCPYANTTFLSGSDDKTVKVWDLSTGAVQYDLSGHEDYVRTASWMSATRLVSGGYDGTIRLWDTRIADPEVMSFSHGEAIDVVLPMQSGSTVISAGGPSIKVWDLVAGRQTPTKKLSNHQKSITCLAMNSENTRLLSGGLDGHVKIYNISDWKVVHGMKYSGPILSMGLSPDSCNLVVGMSNGTLSQRTRRITKQTSSKTPFLGGVGSAFGVVGKKKQIYKGENDEFYVEEARRKRLRPFDKALKSFCYSDALDMVLENGSPVLIITMLIELLHVGGLRIALSNRDDLSLTPLINFLRKYIRDPRFSETLCIVTSTILDIYGAALGGSVMVENAISKLREKVEQEVAVTQRANELVGMLQMLSA

SEQ ID NO: 11156 - DNA, 1557 bp, Ashbya gossypii ATCC 10895
  CDS (1)..(1557)
atgtcctctgcagtacctagggttactccgctgaaaaatcctgtactgccgctgcagactacacccgagcagcggtattggcggcagtattcatcaacacagttggtaaaagagcataatgcagtgacgcatatagagttcaacccgcagcacccacacgattttgcagttacatcttccacgcgtgtacagctgttttcctcccggacgcggcaagtgatcaagaccttctcgcggttcaaggacgtggtctacagctcgtcgttccggccggatggcaagctgcttgcagcgggtgatgccacagggctggtgtctgtgtacgacagctacaacccccggaatctgcttgtgtctatcaaggcttcgacgcatccggcgcacgtcactaagttccacccgctggacaaacagactctagtgacggcgacggacgatcgtgtggtgcgggtgtgggacatctcccatgcatatgagccgactctggagctgctgggagcgtctgactatgtgcgttccgtgtgcttcgtgccaggagcgccacatatggttgtctcgggatgctacgacggcgtggtacggctgcatgacacgcggacgcgctccgcacagcccgtcacgcagctcaatcacgggatgtctgtggaagacatagttgcaatctctcccactcagctggtgtcgtgtggcggtagtaagttcaaggtatgggacctcactggaaacaagctattgcacgagcgcggcaactttgccaagactgttacctgtctcgactacgtgaacatgccagatggcggtgcgatgaactcttgcttgcttgcatcatctctcgatggccatgtcaaggtgtttgatccattagacggttacagagtgaagtttggttggaagttcagcagcgcagtattgagctgtgccatctctcccggcgacgcgcaagggaacaagcatctagtagccggcctgtcatctggtctactagccataaggacaaataagaagacccgtgaaccaaagggtgatagcgatgcgcaggacacggagactgccattatgggcaaggaacgcaagagtaacaactttcaacggatgatgcgtggttctgaatacaaaggcgaccaagagcatatcatacataatgacaagccacgacagcaacccagactacgtttattcgaaaagaaactgaaccaattcaaatgggccgaggcccttgacagcgcctttgttccagggatggcgaaggagctgacgctgactgttctacaagaactccgcaaacgggggaagattcgggtcgcactatatgacagagacgagacctctctcgagccgctactaaattggtgtctaaaaggcttagaagataccaggagcgctcctgttgttgctgattggatagcagtcgtgcttgaaatgtacgcgacaataattgagcgctcacctgtgttggaagaaatggtcgtggcgctaaggaataaagtaagacaggagattcacaagtgcaaagaagcacaaaagatccaaggtatgctccaaatattaaccaattaa

SEQ ID NO: 11157 - protein, 518 aa, Ashbya gossypii ATCC 10895
MSSAVPRVTPLKNPVLPLQTTPEQRYWRQYSSTQLVKEHNAVTHIEFNPQHPHDFAVTSSTRVQLFSSRTRQVIKTFSRFKDVVYSSSFRPDGKLLAAGDATGLVSVYDSYNPRNLLVSIKASTHPAHVTKFHPLDKQTLVTATDDRVVRVWDISHAYEPTLELLGASDYVRSVCFVPGAPHMVVSGCYDGVVRLHDTRTRSAQPVTQLNHGMSVEDIVAISPTQLVSCGGSKFKVWDLTGNKLLHERGNFAKTVTCLDYVNMPDGGAMNSCLLASSLDGHVKVFDPLDGYRVKFGWKFSSAVLSCAISPGDAQGNKHLVAGLSSGLLAIRTNKKTREPKGDSDAQDTETAIMGKERKSNNFQRMMRGSEYKGDQEHIIHNDKPRQQPRLRLFEKKLNQFKWAEALDSAFVPGMAKELTLTVLQELRKRGKIRVALYDRDETSLEPLLNWCLKGLEDTRSAPVVADWIAVVLEMYATIIERSPVLEEMVVALRNKVRQEIHKCKEAQKIQGMLQILTN

SEQ ID NO: 11158 - DNA, 1590 bp, Strongylocentrotus purpuratus
  CDS (1)..(1590)
atgtcgtataaggcgactgccgtgaaaagacttccacgtgccaaggggcaaccaagcaaagaagcgctattctggaagaattttgaatttccagttacagtcaaggaatatggtgcagttactgacattgacttttcccctcttgaaccatataactttgctgtctccagctctacaagggtacaaatctacaatcccttaacaaaccagatagagagatctttatcccggtttaagggtgttgcttatggggctagctaccgtcaagatggtaaactcatggtggcaggaggtgatgaagccttcgttcgtctctttgacctctcgggtcgcgctgtcctcagaatcttcaaaggacatcaagggcctgtccatgttgccaagtttgcagctaacaatcaggtgatgtcctgctcagatgataagactgtgcgttgttgggacatacccagtgaggatgaagtcatccgtttctcagatcatagtgattacatcaggtcaggggtcattagtcctagtagtaaagacatctggctgactggatcgtacgaccattctgtaaagatgtatgatttgcggacagggacgagtatcatgagtgtagaccatggtcaaccagtagaaagggttctcatgtttcctgctggaggagtcttcttatctgcaggtggaaactatgtgaaggtatgggatgccctcgctgggggtcgtctcctagcaacagtcagcaatcatcacaagaccataacagctatgtgcttcaacggaaataactccagacttcttacggcatctttagacagacatgtgaaggtgtatgatgtgagcacatatcaactggtcgctagcatggattaccctgcacccattctctctcttggaatctcacctgatgataagacagtggtggttggtgcaacatcaggactcttatccatcaaacatcccaaagcagctgatgagctagagacatccaagcctcatagacagcgcagtgcaggagctaacagtagatactacgtccatggaaaggtcttcacaccaaaggaggatgacatggttgtaacccatatcaacaaagatcatctcgagaagtatgataggatgctgaaaaagtttgaacattccaaggccttagatgcagccctacatccaaacgtaagattgagaacgcctcacgtgacgttcagcttgcttcaagagttgatcagacgtggtgtggtgaagagtgctctctctggcagggatgatcgttggctctgcatcatcttaaccttcttgaagaagcatatatcagacacaaacttcactcctattgcagtggatatctccaacattatcttagatatctatggtcctgtgatgggtgagagtgaggatgttttgaagcggttccaggccttacaggttggtctccagcaggagcttcgttaccataccactctagaggagatccgagggatgctggataccatcctagctgcatcacataccattaccaaggataccatcaacatcatctcagatgatacagagataagaagtgatgacaggatagactctaatggttttgaggtgggggcaacatga

SEQ ID NO: 11159 - protein, 529 aa, Strongylocentrotus purpuratus
MSYKATAVKRLPRAKGQPSKEALFWKNFEFPVTVKEYGAVTDIDFSPLEPYNFAVSSSTRVQIYNPLTNQIERSLSRFKGVAYGASYRQDGKLMVAGGDEAFVRLFDLSGRAVLRIFKGHQGPVHVAKFAANNQVMSCSDDKTVRCWDIPSEDEVIRFSDHSDYIRSGVISPSSKDIWLTGSYDHSVKMYDLRTGTSIMSVDHGQPVERVLMFPAGGVFLSAGGNYVKVWDALAGGRLLATVSNHHKTITAMCFNGNNSRLLTASLDRHVKVYDVSTYQLVASMDYPAPILSLGISPDDKTVVVGATSGLLSIKHPKAADELETSKPHRQRSAGANSRYYVHGKVFTPKEDDMVVTHINKDHLEKYDRMLKKFEHSKALDAALHPNVRLRTPHVTFSLLQELIRRGVVKSALSGRDDRWLCIILTFLKKHISDTNFTPIAVDISNIILDIYGPVMGESEDVLKRFQALQVGLQQELRYHTTLEEIRGMLDTILAASHTITKDTINIISDDTEIRSDDRIDSNGFEVGAT

SEQ ID NO: 11160 - DNA, 1620 bp, Coccidioides immitis RS
  CDS (1)..(1620)
atggcggctccggtcctgccattgccgcaggtgaagctaccctccataccatccaccaggcttaccgcagaacagcttcactggcgctccttcaagactcctcttctcatatcctccccgtccaacacgccgattaatcacatatcacagcctcccgcccctgctttgtcctctcctgcctcccttcatcccccggatatttttaccgtcacaaccggtgcccgcgtccagatatattcgatccggacgcgaaagcttttaaagtcgattactcgctttgatgataccgcccgatgttctgagatccgcccagatggcaggatcctcgtggcgggtgatgagacgggtacaattcaggttttcgatgttaactctcgctccatcttaaagacatggcgagaccacaagcaacctgtatgggtgaccaggttctctccgacggatccgacctctcttctcagcgcaagtgatgataagacggtgcgactatgggacctgcccagcgagaatagtgctcaggtctttgttggccactcggattatgttcggagcggctgcttcatgcctggggctcagtctgccaatttggtcctgtctggtagttatgatcagacggttaggctatgggactcaagagtggccggcagacaggtgatgacgtttaaaatggccgccccggtggagggcgtccttgctatgccttccggcacaaccgtcttagctgccgcagacaatcagattgccgtgctggacgttgtcgctgggaagcccctccacctgattaagagccatcagaagactgttacctgcctgtcattggcctcgaaaggcagtaggattgtcagcggtgctctagatggccacatgaaagtgttcgaaacgaccggatggaatgttgtgggtggatccaaatatccttcccctattttatcgcttggggtcatcacgtcaggaccgcagcgcgaagacaagcacatcgccgtcggcatgcaatcgggtgtcctctctctccgcactcgcctttccggcgaacagaaaatccgggaacgccagcgccaacgagaaatgcaggctcttctcgagggtaaactcgacgaacatgatcgcacggtctcaaaggaacagaagaaacgcggccgcggatgggaaaaacgacttcgaggtatggatttcatcggtgagggtgtcgatatcgtcattgatgcgcaggacaccaagaaacggaagaaggagaagtcctgggagaatgacttgcggaagggtcgttatgccgcatcactcgaccaggttcttgccgcgggcgataatatcaccgttgttacgcttctcactgcactacgccaccgtgcggcgctccgcacagcactctcaggacgggacgaagttacgctgcagcctatcctaaaatgggtgcataaatcgataacagatccgaggttggtcgatatatgtgtcgagatctcgatgaacgtactggatttgtactctgcccatttgggacaatcagcccaaattgatcgactgatagagaagcttcatcgaagagtcagggaggaggttgaccgtgcacagcacgcttggcagacgaaaggcatgttggatatgttgaggcgctcctga

SEQ ID NO: 11161 - protein, 539 aa, Coccidioides immitis RS
MAAPVLPLPQVKLPSIPSTRLTAEQLHWRSFKTPLLISSPSNTPINHISQPPAPALSSPASLHPPDIFTVTTGARVQIYSIRTRKLLKSITRFDDTARCSEIRPDGRILVAGDETGTIQVFDVNSRSILKTWRDHKQPVWVTRFSPTDPTSLLSASDDKTVRLWDLPSENSAQVFVGHSDYVRSGCFMPGAQSANLVLSGSYDQTVRLWDSRVAGRQVMTFKMAAPVEGVLAMPSGTTVLAAADNQIAVLDVVAGKPLHLIKSHQKTVTCLSLASKGSRIVSGALDGHMKVFETTGWNVVGGSKYPSPILSLGVITSGPQREDKHIAVGMQSGVLSLRTRLSGEQKIRERQRQREMQALLEGKLDEHDRTVSKEQKKRGRGWEKRLRGMDFIGEGVDIVIDAQDTKKRKKEKSWENDLRKGRYAASLDQVLAAGDNITVVTLLTALRHRAALRTALSGRDEVTLQPILKWVHKSITDPRLVDICVEISMNVLDLYSAHLGQSAQIDRLIEKLHRRVREEVDRAQHAWQTKGMLDMLRRS

SEQ ID NO: 11162 - DNA, 1629 bp, Neosartorya fischeri NRRL 181
  CDS (1)..(1629)
atggctgcccccgtcctccccctgcagcaggtcaagctgcctgcgctgccctcaacccgcttgacgccagagcagcagtactggaagaccttcaagaatccgctcctcatcccctctcccgccaacggtcccatcaatctcatcacgcagccgtccgctccttcatccgcctccgccttcccgtccctcacccagccgcccgacgtcttcaccgtgacgaccggcgcccgcgtgcagatctactccatccgcacccgcaaactcctccgcacaatcacccgcttcgacgataccgtccgcgggacagatgtgcggcccgacggccgggtagtcgtgacaggcgacgacacaggcacagtgcaggtcttcgacgtcgcgtcgcgggcgatcctgaagacgtggaaggaccaccgccagccggtgtgggtgaccaagttctcgccgagcgatcctacctccgtgctgagcgccagcgacgaccggaccgtgcggctgtgggatctgccgagcgagagcgccgcgcggacgttcctggggcatacggactatgtgcgtagcggggcgtacatgcctggctcgctggcggcgtcgggcttggtggtgtcggggagttatgatcggacggtgaggctgtgggatccccgcgtggagaaccgggcggtgatgacgtttaagatggcggcgccgattgagagtgtgttgcctatgccgacggggacgacgctgctggcgtcggcggagaataagatcgcggtgctggatattgtggcggggaagccgctgcatatgattcagagtcaccagaagacggtgacggcgctggcattggcgtcgaatggggagaggttgctgagtggtgcgttggacgggcacatgaaggtgtttgagacgactgggtggaatgttgtgtctgggtccaagtacccctctccgatcctatcgctgcgggtgatcacgtctggtgtcgcgcgggaggacaagcatatcgcggtaggcatgcagtcgggcctgttatcgatcaagacccggctgtcgggccagcagaagatccgggagcgtgaacgacgcaaggagatgcaggcattgcttgaaggcaagcttgaagagcacgaccggaaggtagccaagcagcagaaactgcgcgggtcaggctgggagaagcggctgcgcggccggaatttcatcggcgaaggcgtggagatcgtgatcgagggccaggacaagaagaagcgcaagaaggagcagacgtgggagtacgacctgcgcaaggcgcggtactcggcggcgctagaccaggtgctggcgtcgagcgacaagacggcgcagctgacgctgttcacggcactgcggcaccgctccgcgctgcgggccgcgctgcagggccgcgacgaggagacgctgcagccggtgctgcagtgggtgcacaagaacatcacggagccgcggctggtgacgctgtgcgtggaggtcgccatgaacgtgttggacatctattcggggaatttgggacagtcggcgcagatcgacaagatggtggagcggctgcatcggcgagtgcgcgaggaggtggaaatggcgcatcaggcgtgtcagaccaaggggatgctggatatgttgcaggccgtatag

SEQ ID NO: 11163 - protein, 542 aa, Neosartorya fischeri NRRL 181
MAAPVLPLQQVKLPALPSTRLTPEQQYWKTFKNPLLIPSPANGPINLITQPSAPSSASAFPSLTQPPDVFTVTTGARVQIYSIRTRKLLRTITRFDDTVRGTDVRPDGRVVVTGDDTGTVQVFDVASRAILKTWKDHRQPVWVTKFSPSDPTSVLSASDDRTVRLWDLPSESAARTFLGHTDYVRSGAYMPGSLAASGLVVSGSYDRTVRLWDPRVENRAVMTFKMAAPIESVLPMPTGTTLLASAENKIAVLDIVAGKPLHMIQSHQKTVTALALASNGERLLSGALDGHMKVFETTGWNVVSGSKYPSPILSLRVITSGVAREDKHIAVGMQSGLLSIKTRLSGQQKIRERERRKEMQALLEGKLEEHDRKVAKQQKLRGSGWEKRLRGRNFIGEGVEIVIEGQDKKKRKKEQTWEYDLRKARYSAALDQVLASSDKTAQLTLFTALRHRSALRAALQGRDEETLQPVLQWVHKNITEPRLVTLCVEVAMNVLDIYSGNLGQSAQIDKMVERLHRRVREEVEMAHQACQTKGMLDMLQAV

SEQ ID NO: 11164 - DNA, 1629 bp, Aspergillus clavatus NRRL 1
  CDS (1)..(1629)
atggctgcccccgttcttcctctgcagcaggtcaagctgcctgcgctgccctcgacccggttgaccccagagcaacagtactggaagacattcaagaatcctctcctgatcccttctcccgccaacggccccatcaatctcatcacgcaacccgccgccccgtcctccgcctcggccttcccctccctcacacaaccccccgatgtcttcaccgtgaccaccggcgcacgggtccagatctactccatccgcacccgcaagctcctccgcaccatcacccgcttcgatgataccgtccgcggcacggacgtgcggcccgacggccgcgtagtagtgaccggtgacgacacgggcacagtgcaggtcttcgacgtagcgtcgcgggcgatcctcaagacgtggaaggagcaccggcagccggtgtgggtgaccaagttctcgccgagcgacccaacctccgtgctgagcgcgagtgacgaccgcacggtgcggctgtgggatctgccgagcgagagcagcgcgcggacgttcgtcgggcacacggactacgtgcgcagcggcgctttcatgcccggttcgctggcctcgtcggggctggtggtgtcgggcagttatgaccggacggtgcggctgtgggatccgcgggtggagggccgcgcggcgatgacgttcaagatggcggcgccgattgagagcgtgttgcccatgccgacggggacgacgctgctcgcttcggcggagaacaagatcgcggtcctggatatcgtggcgggtaagccgctgcatatgatccagagtcatcagaagacggtgacggcgctggcgctggcgtccaacggcgagcgcttgctcagtggtgcgctggacggacacatgaaggtgtttgagacaacggggtggaacgtggtgtccggctccaagtatccctccccgatcctgtcgctgcgcgtgatcacatcgggcgtgagccgggaggacaagcacatcgcagtgggcatgcaatcgggtcttctctcaatcaagacccggttgtcgggccagcagaagatcaaggagcgcgagcggcgcaaggagatgcaggcgctgctggagggcaaactcgaagagcacgaccgcaagatggccaaggagaagaagctgcgcggctcgggatgggagaaacggctgcgcggccgcgatttcatcggcgaaggagtggacattgtgatcgaggggcaggataaacggaagcggaagaaggagcagacgtgggagtacgatctgcgcaaggcgcggtactcggcggcgctggaccaggtcctgtcgtcgagcgacaagacagcacagctgacgctgttcacggcgctgcgacaccgctccgcgctgcgggcgtcgcttcaaggacgggacgaggagacgctgcagccagtgctgcagtgggtgcacaagaacatcacggaaccgcgcctggtgaagctatgcgtggaggtggcgatgaacatcctggacatctactcggggaatctcggccagtcggcgcagatcgacaagttggtggaccggctgcatcggcgtgtgcgtgacgaggtagaaatggcgcatcaggcgtgccagaccaaggggatgttggacatgttacgggctacctaa

SEQ ID NO: 11165 - protein, 542 aa, Aspergillus clavatus NRRL 1
MAAPVLPLQQVKLPALPSTRLTPEQQYWKTFKNPLLIPSPANGPINLITQPAAPSSASAFPSLTQPPDVFTVTTGARVQIYSIRTRKLLRTITRFDDTVRGTDVRPDGRVVVTGDDTGTVQVFDVASRAILKTWKEHRQPVWVTKFSPSDPTSVLSASDDRTVRLWDLPSESSARTFVGHTDYVRSGAFMPGSLASSGLVVSGSYDRTVRLWDPRVEGRAAMTFKMAAPIESVLPMPTGTTLLASAENKIAVLDIVAGKPLHMIQSHQKTVTALALASNGERLLSGALDGHMKVFETTGWNVVSGSKYPSPILSLRVITSGVSREDKHIAVGMQSGLLSIKTRLSGQQKIKERERRKEMQALLEGKLEEHDRKMAKEKKLRGSGWEKRLRGRDFIGEGVDIVIEGQDKRKRKKEQTWEYDLRKARYSAALDQVLSSSDKTAQLTLFTALRHRSALRASLQGRDEETLQPVLQWVHKNITEPRLVKLCVEVAMNILDIYSGNLGQSAQIDKLVDRLHRRVRDEVEMAHQACQTKGMLDMLRAT

SEQ ID NO: 11166 - DNA, 1617 bp, Drosophila pseudoobscura pseudoobscura
  CDS (1)..(1617)
atggacagccggttttatgctctgaatatacgaaggtatcagcagcgggcgcagatagagacgcccgacacaatctattgggaaaggctagagaaacccgagttcctcaaagagtgcaacaccatcgactatttggacttcagccccagcgacccagataactttgtcgtgacttgctcggttcgcgtccaaatatacaatttggttaccaagctggtggtaaagaacctatcaaggttccaaaagaccgcctatggggcgacatttcggcaagatggccggctactggcggccggtgacgaagagggccatgtcaagctattcgacaccaccagccggaacatcttgcgaatctttaagggccataaggcgcccgtgcataggactttcttcaccaacgacaaactgcagctgaccagcttctgcgacgacaagtcggtgcgcctgtgggacgtgtccaacgaaaaggtagtaaacacttataacgatgcccacacggactacattcgcgctggggccatgcatccgctggcgggcaacatgttcgtctccggcggctacgatggtaaaattaatctgtatgatacgcgtgcagagaacgcgattcagcgtaccctggaccatggcagtccggtggagtcacttctattcatgcccaacggttccatattcatcagcgctggcggcaaccaggtgcgtgtctgggacctcataagcggctgccgcctgctcacgatgatgtcgcagcaccacaaaacagtgacctgcctgcgcctgggaactgacggacgccgcctgttctccgccggcctggatcggcatgttaagatctacgacaccaccacttacaaaaccgtccacacgcttacctatcccaatgccgttgtgagtctgggcgtggccagcggcgatcaggccgtggtcgccggcatggtggatggtctcatctcaatcaagcgtatgatcgtcgaaaacaaaccgagtcacctgaacaagatccgtgtgagtcatgcggctaaagaaaagaggaagctcgtcaagaaactgatgcgaccagatacctcgcaagcggtggaccacaccatcaaaaacaggttcaagagtaccaaactccagacctacgacgttcatctccgcaagttcaacttcaagaaggctttggatgaggttctcctccctcttcaggtggaaaaacacccagaaaacactgtggctgtcatcacagagctgctgcaacgccgggccctggacaaggccctcaccgaacgacccgacgtagttctcatccagtttatcgattttctctgcacacacatgggcgaaatccgttttatgcgaccgctaatgaatgccgccaataccgtcctcgacatcttcgaaggcagttgtgtgtcgtatagtttaaaagtgatggaagcactacaacgactgtctaccgctatccaggcggaaatcgcactcaccgtcgagatgctccagctgaagggagccatggatacgattattggcgtctccctgaacgacaactacaggccgaagacgcgcacaagtacaccaaaggaagtccgaatgcaaccgtcagcgcgcgcggaaaagtacgtgatctatgttgattga

SEQ ID NO: 11167 - protein, 538 aa, Drosophila pseudoobscura pseudoobscura
MDSRFYALNIRRYQQRAQIETPDTIYWERLEKPEFLKECNTIDYLDFSPSDPDNFVVTCSVRVQIYNLVTKLVVKNLSRFQKTAYGATFRQDGRLLAAGDEEGHVKLFDTTSRNILRIFKGHKAPVHRTFFTNDKLQLTSFCDDKSVRLWDVSNEKVVNTYNDAHTDYIRAGAMHPLAGNMFVSGGYDGKINLYDTRAENAIQRTLDHGSPVESLLFMPNGSIFISAGGNQVRVWDLISGCRLLTMMSQHHKTVTCLRLGTDGRRLFSAGLDRHVKIYDTTTYKTVHTLTYPNAVVSLGVASGDQAVVAGMVDGLISIKRMIVENKPSHLNKIRVSHAAKEKRKLVKKLMRPDTSQAVDHTIKNRFKSTKLQTYDVHLRKFNFKKALDEVLLPLQVEKHPENTVAVITELLQRRALDKALTERPDVVLIQFIDFLCTHMGEIRFMRPLMNAANTVLDIFEGSCVSYSLKVMEALQRLSTAIQAEIALTVEMLQLKGAMDTIIGVSLNDNYRPKTRTSTPKEVRMQPSARAEKYVIYVD

SEQ ID NO: 11168 - DNA, 1518 bp, Pichia stipitis CBS 6054
  CDS (1)..(1518): transl_table=12
atgtcttctagcagacagagagtttctcaagtgcgaaatcccactcttccatcgcagaccactcctgagcagaggtactggagaggatataccaatccgcaattgatcaaagaaaaccaccccattactcatatccatttcaatcccgtagcgcccaacgattttgcagtaacttcgtcgacgagaatacagatcttctcatccaaaacacgtcaggtaataaagacgttctcacgtttcaaggatatagtttattctggcgaattcagatatgacggtaagttgcttgtcgctgccgatgccaccggtttagtttccatttatgatagctaccaaccacgtaacttacttgtgagtttgaatccgtcctcgcatcctactcatgttgccaagttccatccgactgtaggtaatcaattgatcactggctcggacgataggatagtacgtttatacgatatctcccagactaccaaaggacctgtgacacagttcaacgactcgtaccacggggactacatcagaagtgccagtttcataccgggcaaccctaacttggtggctactggttgctatgatggcttcgtcagattgttcgataccagaaacagctcttcccagcagcttgtagctctgttcaaacaggataaccctgttgaagatgtccttgcgctttcagccacgtcgttggtcagtgcgggaggtcccgtagtgaaagtctgggatctttctcgtggctctcagatcaaggaattgaataatttcaccaaaactgctaccactcttcatgatacaggagacagaggtttgcttgtaggatctttagatggccatgtcaaaattttcgactacacaacttccaactgggatgtcaaattcgggtggaaattcggcagtggtggggttctcagctgcgctgtttcgcctgcttccaacaaccacaagcatttcgtaaccggtttgacttccggtttactctctattcgtactagaaagactgaagccaaggttcagcaaggtattaagcaggaaaagtcaagtgcctacaacaggatgatgagaggtaaagactacttgggagaagaagagcaccaagtcatatattccagcactacccagacgaagaagttgaaacagttcgaaaagcacttgaacgcattccgttgggctgaggctcttgacggtgcctttgtgtcaggattgcccaaggaacacaccatcactgtgttgaacgaattaaaaaagcgtggaaagatcagaatctcgttgtacggaagagacgaaatatcgctcttgccaatcttacagtggtttatcaagaacttagaggatgtcagatcattcaacttgatctgcgactacgtagctgtcatcttggagatgtacggctcgttgattgactccagcatagtattggaagaatgtttcgcaaacttgttgaagagaatcaacattgaaattaagaaatgcagagaagccaccgaaattggaggcatgttggaacttcttacagtatag

SEQ ID NO: 11169 - protein, 505 aa, Pichia stipitis CBS 6054
MSSSRQRVSQVRNPTLPSQTTPEQRYWRGYTNPQLIKENHPITHIHFNPVAPNDFAVTSSTRIQIFSSKTRQVIKTFSRFKDIVYSGEFRYDGKLLVAADATGLVSIYDSYQPRNLLVSLNPSSHPTHVAKFHPTVGNQLITGSDDRIVRLYDISQTTKGPVTQFNDSYHGDYIRSASFIPGNPNLVATGCYDGFVRLFDTRNSSSQQLVASFKQDNPVEDVLALSATSLVSAGGPVVKVWDLSRGSQIKELNNFTKTATTLHDTGDRGLLVGSLDGHVKIFDYTTSNWDVKFGWKFGSGGVLSCAVSPASNNHKHFVTGLTSGLLSIRTRKTEAKVQQGIKQEKSSAYNRMMRGKDYLGEEEHQVIYSSTTQTKKLKQFEKHLNAFRWAEALDGAFVSGLPKEHTITVLNELKKRGKIRISLYGRDEISLLPILQWFIKNLEDVRSFNLICDYVAVILEMYGSLIDSSIVLEECFANLLKRINIEIKKCREATEIGGMLELLTV

SEQ ID NO: 11170 - DNA, 1626 bp, Aspergillus niger CBS 513.88
  CDS (1)..(1626)
atggctgcccccgtcctccctctgcagcaggtcaagctgccggcgctgccctcgacccgtttgacgccggagcagcaatattggaaaacattcaagaatcctctcctcatcccctcgccagccaatggccccgtcaacctcatcacgcaaccctccgctccctcctctgcctccgccttcccttccctcacccaaccccccgatgtgttcaccgtgaccaccggcgcccgcgtccagatctactccatccgcactcgcaaactcctccgcacaatcacccgcttcgatgatacggtacgaggcacagatgtccgtcccgacgggcgagtcatcgccgttggtgacgactctggtacggtgcaggtgttcgacgtgagctcccgtgccatcttgaagacatggaaggatcacaagcagcccgtctgggtcacgaaattctctcccagcgaccctacatgcgtcatgaccgccagtgacgatcggacggtacgactgtgggatctgcccagcgagaacagccagaaggtcttcactggccataccgattacgtgcgcagcggtgcatttatgccggggtctctggcctcctccggcctggtggtctctggtagttacgaccggaccgtgcgactgtgggatcctcgcgttgaaaaccggtccgccatgacattcaagatgggcgcagcgattgagacggtgctccccatgcccacgggcacgacggtgcttgcggcggccgacaacaagatcgcggtgctggatatcgtggccggtaagcccctgcacatgattcagagccaccaaaagaccgtcacgtcgctggcgctggcgtcgaacggcgagcgcctgctctccggtgcgctggacggccacatgaaggtattcgaaacgaccggctggaacatggtctcgggctccaagtacccgtcccccattctctcccttcgcgcgatcacatcgggcatcgcccaggaggacaagcacattgccgttggtatgcagtctggtcttctgtcgatcaagacccgcctgtccggacaacagaagatccgtgagcgcgagcgccgcaaggagatgcaggcgctgctggaaggcaagctggaagagcacgaccggaaggcggccaagcaaaagaagcagcgcggatccggatgggagaagcgcctgcgcggacaggactttgtcggtgagggcgtggacattgtgatcgaggggcgggacctcaagaagcggaagaaggagcaaccgtgggaactcgacctgcgcaaggcgaagtactcggcggccctggaccaggtgctgcggtcgaacgacaagacagcacaattgacgctattgacggcgctgcggcatcggtccgcgctgcgggcgtccctgcagaatcgcgacgaggtgacgctgcagccggtgctgcaatgggtgcacaagaacatcacggagccgcgactggtgcagctgagtgtggaggtggcgatgaacgtgctggatatctactcgggcaacctgggccagtcggcgcagatcgacaagatggtggagcgactgcaccggcgagtgcgcgacgaggtggagatggcgcatcaagcgtaccagacgaagggaatgttggagatgcttgctgcatga

SEQ ID NO: 11171 - protein, 541 aa, Aspergillus niger CBS 513.88
MAAPVLPLQQVKLPALPSTRLTPEQQYWKTFKNPLLIPSPANGPVNLITQPSAPSSASAFPSLTQPPDVFTVTTGARVQIYSIRTRKLLRTITRFDDTVRGTDVRPDGRVIAVGDDSGTVQVFDVSSRAILKTWKDHKQPVWVTKFSPSDPTCVMTASDDRTVRLWDLPSENSQKVFTGHTDYVRSGAFMPGSLASSGLVVSGSYDRTVRLWDPRVENRSAMTFKMGAAIETVLPMPTGTTVLAAADNKIAVLDIVAGKPLHMIQSHQKTVTSLALASNGERLLSGALDGHMKVFETTGWNMVSGSKYPSPILSLRAITSGIAQEDKHIAVGMQSGLLSIKTRLSGQQKIRERERRKEMQALLEGKLEEHDRKAAKQKKQRGSGWEKRLRGQDFVGEGVDIVIEGRDLKKRKKEQPWELDLRKAKYSAALDQVLRSNDKTAQLTLLTALRHRSALRASLQNRDEVTLQPVLQWVHKNITEPRLVQLSVEVAMNVLDIYSGNLGQSAQIDKMVERLHRRVRDEVEMAHQAYQTKGMLEMLAA

SEQ ID NO: 11172 - DNA, 1497 bp, Pichia guilliermondii ATCC 6260
  CDS (1)..(1497): transl_table=12
atgtcctctgtacggcccggagtagccactgtaagaaacccgacgttgccgtcacagacaacgctggagcagcgatattggcgaggtttcaccagcccattattggtcaaggagagccacccaattcgccatatcgatttcaacccaacctcacctcacgactttgccgttacctcatccaccagaatccagatattttcttccaaaacacgccaagtgatcaagacgttctcccggttcaaagatacggttttcagtggcgagtatcgattcgatggtaagttacttgtggcagctgatgcatctggattggtatccatatttgatgcttatcagccacggaatcttctcgtgagtcttcaaccatcatcgcatccgacccaggtggcaaagttccatccttctgtcggcaatcagctcgtaactggtagtgatgatcgagtattaaggatatacgatatttctcaaaccactactggaccaattcatcaatttgacgactctttccacagcgattatatccgaagtgcatgtttcattcctggaaaccctaacttggtggccacggcttgttacgacggcatagtgagggtgtttgatactcgtcagcagcaacttgtttccaagtttaatcataccaatcccgttgaagatgtattggcaatttcccccaccacattagtaagtgctggaggtcctcaggtcaaggtatttgacttgtcacggtcacagcagattcatgaactaaacaatttcacaaagactaccacctgcttgcatgatactggcgatcgtggacttctcgtgggttccttagatggccatgtgaagatatttgacaccaactcgcctacgtgggatgtcaagtttggttggaaatatggaagcggtggtgttttatcgtgtgctgtttccccatcaaatcacaagcatttcgtaactggactcacatctggattactctcaattcgaaccaggaaagacgcacgtccaaacgtggccaaactggtgaaaacctctgcattttcccgcatgatgcgtggctcagaataccatggcgaagacgaggtaagaatcgtcgagacagccaaagcatcaaccaaaaagccaaagcagtttgaaaaacatcttaatgcttttagatggtccgaggcattggacagtgcctttgctacggggcttcctaaagaacatactataaccgtattaaatgagttacgcaataggggaaaagttcgggtttctttggtaggtcgtgatgagatctcgctcttgcctatcctacaatggttcattaaaaatattcaggacgtaagatcattcaacttgatatgtgactatattggggttattgtcgagatgtatggttctctcatcaataagagtgtggtgttggaagaagtgtttgccaatctaatgacaaaggtgcaaactgaaatcaatgtgtgtcgcgaggccagcgagatcaagggtatgctagagttgttatctgtataa

SEQ ID NO: 11173 - protein, 498 aa, Pichia guilliermondii ATCC 6260
MSSVRPGVATVRNPTLPSQTTLEQRYWRGFTSPLLVKESHPIRHIDFNPTSPHDFAVTSSTRIQIFSSKTRQVIKTFSRFKDTVFSGEYRFDGKLLVAADASGLVSIFDAYQPRNLLVSLQPSSHPTQVAKFHPSVGNQLVTGSDDRVLRIYDISQTTTGPIHQFDDSFHSDYIRSACFIPGNPNLVATACYDGIVRVFDTRQQQLVSKFNHTNPVEDVLAISPTTLVSAGGPQVKVFDLSRSQQIHELNNFTKTTTCLHDTGDRGLLVGSLDGHVKIFDTNSPTWDVKFGWKYGSGGVLSCAVSPSNHKHFVTGLTSGLLSIRTRKDARPNVAKLVKTSAFSRMMRGSEYHGEDEVRIVETAKASTKKPKQFEKHLNAFRWSEALDSAFATGLPKEHTITVLNELRNRGKVRVSLVGRDEISLLPILQWFIKNIQDVRSFNLICDYIGVIVEMYGSLINKSVVLEEVFANLMTKVQTEINVCREASEIKGMLELLSV

SEQ ID NO: 11174 - DNA, 1521 bp, Lodderomyces elongisporus NRRL YB-4239
  CDS (1)..(1521)
atgtcatcagctagacaaggtgttcagcccgtgcgaaatccaacgcttgttgctcagactactccagagcaaaggtactggcgaagttatgttagtccgcaacttataaaagagaatcatccaatcaatcacattgaatttaacccagtttcaccacatgatttctctgtcacgtcttccacgcgtattcaggtcttttcctcgaaaacacgccaagttatcaagacgttttcgaggttcaaggatgtggtccttgcatcgaactatcgttttgatggtaaattgatttgtgcttcggatgccactggcttggtgtccatctacgatagctatcaacctagaaatcttttggttagtctaaacccttcactgcatccaacccatgcagtaaagtttcacccgacaatcgcttcacaattgttcaccggttcagatgataggaaattgaggctttgggatatctcacaaacctctcaaggtccaattatgcaatttgatgagtcacatcatggtgattatattcgtagcataaattacatcccgggaaaccccaacatggttcttaccgggtgttacgatggagttgtgagattgtttgacacaagagactcgacgggagcagtagcacgctttgaccaagaggaccttgtcacggatgttttggctgttagctcaagcactattgttagtgctggtggtccgcatgtgaaaatatgggacttgactagaaatgcacaaattcatcaactcgacaattttacaaagacaacaacttgcttgcacgacacaaaggaaaagggtttactagtgggatcattggatggtcatgtcaaaatatttgactacaacactacaaactgggatgtcaaatttggctggaagttcagtagtggtggtgttttgacatgtgctgtttcaccagaaaatcataaacactttgccgcaggtttaacgtccggcttaatctcaattagaacgaagaagacggagccaaaggtaaaacaaggtgttaaacaagagacaacaaatgcatatgcgagaatgatgaaaggcagggactactctggcgaagaagaatacgagattgtgaacaatactagtacacctcagctgcaacaaaaggggaaattaaaacaatttgagaaataccttaatgctttcaaatgggcagaggcattggacagcgcatttgcaccgggattacctaaagagcaaaccatcacaattttaaatgagttgaagaagaggggcaagatgagaatcgcgcttttcgaaagagacgagatatctttgttaccaatgttgcaatggtttactaaaaatatagaagatgtgagatcattcaatctattatgcgactatagtgcggtaatcttggagatgtatggtgacaagattgacaaaagtgtaatccttgaggaatcgtttaacagtcttttgaaaaagattgagacggaaatcaaaaagtgcaatgaagctattgaaatcaacggtatgttagaattacttacagcccaataa

SEQ ID NO: 11175 - protein, 506 aa, Lodderomyces elongisporus NRRL YB-4239
MSSARQGVQPVRNPTLVAQTTPEQRYWRSYVSPQLIKENHPINHIEFNPVSPHDFSVTSSTRIQVFSSKTRQVIKTFSRFKDVVLASNYRFDGKLICASDATGLVSIYDSYQPRNLLVSLNPSLHPTHAVKFHPTIASQLFTGSDDRKLRLWDISQTSQGPIMQFDESHHGDYIRSINYIPGNPNMVLTGCYDGVVRLFDTRDSTGAVARFDQEDLVTDVLAVSSSTIVSAGGPHVKIWDLTRNAQIHQLDNFTKTTTCLHDTKEKGLLVGSLDGHVKIFDYNTTNWDVKFGWKFSSGGVLTCAVSPENHKHFAAGLTSGLISIRTKKTEPKVKQGVKQETTNAYARMMKGRDYSGEEEYEIVNNTSTPQLQQKGKLKQFEKYLNAFKWAEALDSAFAPGLPKEQTITILNELKKRGKMRIALFERDEISLLPMLQWFTKNIEDVRSFNLLCDYSAVILEMYGDKIDKSVILEESFNSLLKKIETEIKKCNEAIEINGMLELLTAQ

SEQ ID NO: 11176 - DNA, 1716 bp, Ajellomyces capsulatus NAm1
  CDS (1)..(1716)
atggcggcccccgttctcccgctcccgcaaacaaaactcccctcaatcccctccacccgcctaacccccgagcagcaatactggcgctccttcaagaaccccctcctcctgccctccccgtccaacagccccataaaccacatctcccaaccctccctcccctcccccgcctcctccttcaccacctccgcagccagcagcccagcagcgcccccagacctcttcaccgtcaccaccggcgcccgcgtccaactctactcaatccgcacacgcaagcttctaaaaaccatcacccgtttcgacgatatctcccgctgcgcctccgtgcgcgccgacggccgcgtcctcgccgcctccgacgacggcggcaccatccaagtcttcgacatccactcccgcgccatcctcaagacttggcgcgagcacaaacagcccgtctgggccgtgcagttttctcccgcgaacccaacggcgctggtcagcgcgagcgacgaccgtacggtccggctgtgggatctgcctagcgagagcagcgtgcgcacgttcgtggggcatgcggactatgtgcggtgtgcggggtttatgcctgcggctggcggagggagggggggtgatttgctctattcgggtgggtatgatgggttggtgaaggtgtgggattcgcgagcggcgacggcggcgggccctggaggcgggggcaggagtgtaatgacgtttaagatgcgggcgccggtggagagtgtgttgccgttgacggcggggacgacggtgcttgcggcggcggaaaataagattgcggtgctggatgttgtggcggggaagccactgcatgttatcaaaagccatcagaagacggttacggcgctgtcgttggcgtcggggggtaggaggttagttagtggcgcgctggatgggcatatgaaagtgttcgagactacggggtggaatgttgtaggcgggagtaaatacccgtctcccattttgtccctgggcgtcattaccactggctcggacagggaggacaagcatatcgcggtcggcatgcaatctggcctgctctccatccgcacgcggctatcgggtgagcagaaggtgcgcgagcgagagcggcagagagagatgcaggcgctgctcgatggcaagctagacgaacacgacaagcgcatggcaaagaaacagaaacagaagcgcggcaagggctgggagaagcgtctgcgtggcatggattttgtcggggaaggggttgatatcgtcatcgatgcccaggagccctccgcctcggcgcggaagcgcaagcgggaacagccctgggaactcgacctgcggaagggccgctatgccgctgctcttgatgcggtcctgtgcccacccaacaccaacgacgccaccccgacgaacagcaggctcaacaccctaaccctcctcacggcgctacgacaccgctccgccctccgcacggcgctcagtgggcgcgatgaagtcacgttgcaacccgtgttacagtgggtgtataaatccatcacagacccgagagttgtggatatgtgtgttgaggttgcgatgaacatactggatatttactcggggaacctgggccagtcggtggtttttgacgggatggtagagaagctccatgcgcgagtacgggaggaggtggatcgtgcacaacaggcgtggatgacgaaggggatgctggggatgctgagtgtatcttga

SEQ ID NO: 11177 - protein, 571 aa, Ajellomyces capsulatus NAm1
MAAPVLPLPQTKLPSIPSTRLTPEQQYWRSFKNPLLLPSPSNSPINHISQPSLPSPASSFTTSAASSPAAPPDLFTVTTGARVQLYSIRTRKLLKTITRFDDISRCASVRADGRVLAASDDGGTIQVFDIHSRAILKTWREHKQPVWAVQFSPANPTALVSASDDRTVRLWDLPSESSVRTFVGHADYVRCAGFMPAAGGGRGGDLLYSGGYDGLVKVWDSRAATAAGPGGGGRSVMTFKMRAPVESVLPLTAGTTVLAAAENKIAVLDVVAGKPLHVIKSHQKTVTALSLASGGRRLVSGALDGHMKVFETTGWNVVGGSKYPSPILSLGVITTGSDREDKHIAVGMQSGLLSIRTRLSGEQKVRERERQREMQALLDGKLDEHDKRMAKKQKQKRGKGWEKRLRGMDFVGEGVDIVIDAQEPSASARKRKREQPWELDLRKGRYAAALDAVLCPPNTNDATPTNSRLNTLTLLTALRHRSALRTALSGRDEVTLQPVLQWVYKSITDPRVVDMCVEVAMNILDIYSGNLGQSVVFDGMVEKLHARVREEVDRAQQAWMTKGMLGMLSVS

SEQ ID NO: 11178 - DNA, 1611 bp, Botryotinia fuckeliana B05.10
  CDS (1)..(1611)
atgtccgcaccagtgacaggtctaccggcggttaaactccctactgccccctcgccaattacacctgaacaacgatattggaagggttttcgctcccagcaactcatcccatcaccaacgaattatcccatcacgcacatatcgttccctcctccaccaacaaacgctttatcaccctccggcaatgattacttctgtgttaccactggtactcgacttcagatctactcaattcgcacacgaaaattagtaaagactattactcggttctcagatgttgcgcatagcggagagattcgacgagatggacgtgttatggtggcaggtgacgaaacgggaaagatacaggtttttgatgtgaattcaagagccatcttaaaaacttgggaagagcataagcagccagtctggaccacaaagttttcgccaacagaattgacaaccctcatgagtgctagtgacgatagaactgttaagctttgggatctgccaagtcaagaaagtacaactactttcactggacataccgattatgttagaagtggtgcattcatgcctggatcgatgtcgaacatgatcttgactggtagttacgatgagactgtcagattatgggatcccagagttccaaccagagcagctatgaccttcaagcatgctgcaccagttgagactgtacttcctatgccttcagggacaaccgttcttgctgcagctgataatcaaatctctgttcttgatttggttgctggaaagccattgcacatcatcaagaatcatcaaaagactgttacttcgttgtgcctcgcatcaaacgctactagactggttagtggtggtttggatggccatgtcaaggttttcgagaccacggggtggaatgttgtaactggactcaaatactcagctcctgttttgtcagtcaacgtcgttagctctggtgccaatcgcgaagacaagcatttggttgtaggtatgcaatctggtgtcttatctatcaaaacacgactatcagggcagcaaaaggtgaaagaaagagaaagagcgaaagagatgcaagctttactcgacggtacattagaggaatatgataagaagaacaagaaaagaaaacacactagcggagtagaaaagaggctcagaggaatggatttcatgggagaaggagcagatgtggtaattgagggcaatgcgcgttcaacaaagcgaaaggccccagaatgggagcgtgaactccaactcggtcgatatcatcaagcgctagattgtgtacttcagaaaggccttcctgcagtcactgttcttacacttctcacagctcttcgacacagaagtgccatgcgagcagcattcgagaagcgtgacgagactacaatacaacctatcttcaaatgggtgtccaaacatattaccgaccctcgatacgttcctatatgtactgatgctgctatgctgctcttggacatatacgcagagtatacctctgaatcgccagaattagaacgccaaataaagtttttacatcgacgtgtgaaggcagaagtagaaaggtcacaaaaggcgatgcaggtcaagggtatgctagatctgcttgtggctggggtaaaatag

SEQ ID NO: 11179 - protein, 536 aa, Botryotinia fuckeliana B05.10
MSAPVTGLPAVKLPTAPSPITPEQRYWKGFRSQQLIPSPTNYPITHISFPPPPTNALSPSGNDYFCVTTGTRLQIYSIRTRKLVKTITRFSDVAHSGEIRRDGRVMVAGDETGKIQVFDVNSRAILKTWEEHKQPVWTTKFSPTELTTLMSASDDRTVKLWDLPSQESTTTFTGHTDYVRSGAFMPGSMSNMILTGSYDETVRLWDPRVPTRAAMTFKHAAPVETVLPMPSGTTVLAAADNQISVLDLVAGKPLHIIKNHQKTVTSLCLASNATRLVSGGLDGHVKVFETTGWNVVTGLKYSAPVLSVNVVSSGANREDKHLVVGMQSGVLSIKTRLSGQQKVKERERAKEMQALLDGTLEEYDKKNKKRKHTSGVEKRLRGMDFMGEGADVVIEGNARSTKRKAPEWERELQLGRYHQALDCVLQKGLPAVTVLTLLTALRHRSAMRAAFEKRDETTIQPIFKWVSKHITDPRYVPICTDAAMLLLDIYAEYTSESPELERQIKFLHRRVKAEVERSQKAMQVKGMLDLLVAGVK

SEQ ID NO: 11180 - DNA, 1611 bp, Sclerotinia sclerotiorum 1980
  CDS (1)..(1611)
atggccgcaccagtgacaagtctgccggcagtgaaacttcctactgccccttcgccaattacacctgaacaacgatattggaaaggatttcgctcacagcaactcattccatcaccaacgaattatcctattacgcatatatcattccctcctccaccaacaaacgctttactgccctccagcaatgattatttctgtgtgacgaccggtacccgacttcaaatttactcgattcgcacacgaaaattagtaaagactattactcgattttcagatgttgcgcatagtggagagattcgacgagatggacgtgtaatggtggcaggtgacgaaactggaaagatacaagtctttgatgtgaattcaagagctattttaaaaacatgggacgaacataagcagcctgtctgggcgacaaagttttcaccaacagaattgacaactctcatgagtgctagtgatgaccggactgttaagctttgggacctgccaagtcaagaaagtacaacaactttcactgggcatacggattatgttagaagtggtgcttttatgcctgggtcgatgtcaaatatggtcttgactggtagttatgatgagactgttagactttgggatcctagagttccaactagagcagctatgaccttcaagcatgctgcgccagtcgaaactgtacttcctatgccttcaggtacaacggttcttgctgcagcggataatcaaatctcagtccttgatttggtcgcaggaaagccattgcacattatcaagaatcatcagaagacggtcacatcgttgtgcctcgcatcgaacgctacgagattggttagtggtggtttggacgggcatgtgaaggttttcgagaccactggatggaatgttgttactggattgaaatattcagctcctgttttatcagtcaacattgttagttctggtgctaatcgagaggataaacatttggttgtgggtatgcaatctggggtattgtcaatcaaaacgcgtctatcaggtcaacaaaaagttaaggagagagaaagggcgaaggagatgcaagcattactcgatggcacattagaagaatatgacaagaagaacaagaaaaggaaacatactagcggggtagagaagaggcttagaggcatggatttcatgggtgaaggggcagatgtggtaattgagggtaatacacgttcaacaaagcggaaagttccagaatgggagcgtgaacttcaacaagggagatatcatcaagcactagactgtgtgcttcagaagggcctacccgcagtcactgttcttacacttctcacagctctacgacacagaagtgccatgcgagcagcgtttgagaagcgtgatgagactacgatacaaccgattttcaaatgggtgtcgaagcatattactgatcctcgatacgttcctatatgtactgatgctgctatgttgctcttagacatatacgcagagtatacctgtgattcgccagatctggaacaccagatcagattcttacatcgacgcgtaagagcggaagtggaaaggtcacaaaaggcaatgcaggtcaagggtatgctagatttgcttgtggctggggtaaaataa

SEQ ID NO: 11181 - protein, 536 aa, Sclerotinia sclerotiorum 1980
MAAPVTSLPAVKLPTAPSPITPEQRYWKGFRSQQLIPSPTNYPITHISFPPPPTNALLPSSNDYFCVTTGTRLQIYSIRTRKLVKTITRFSDVAHSGEIRRDGRVMVAGDETGKIQVFDVNSRAILKTWDEHKQPVWATKFSPTELTTLMSASDDRTVKLWDLPSQESTTTFTGHTDYVRSGAFMPGSMSNMVLTGSYDETVRLWDPRVPTRAAMTFKHAAPVETVLPMPSGTTVLAAADNQISVLDLVAGKPLHIIKNHQKTVTSLCLASNATRLVSGGLDGHVKVFETTGWNVVTGLKYSAPVLSVNIVSSGANREDKHLVVGMQSGVLSIKTRLSGQQKVKERERAKEMQALLDGTLEEYDKKNKKRKHTSGVEKRLRGMDFMGEGADVVIEGNTRSTKRKVPEWERELQQGRYHQALDCVLQKGLPAVTVLTLLTALRHRSAMRAAFEKRDETTIQPIFKWVSKHITDPRYVPICTDAAMLLLDIYAEYTCDSPDLEHQIRFLHRRVRAEVERSQKAMQVKGMLDLLVAGVK

SEQ ID NO: 11182 - DNA, 1491 bp, Nasonia vitripennis
  CDS (1)..(1491)
atggacatcaagaaacaattttatcctacagcatcagttgtggtaaaagaattcggaccgatcgactatattgatttttctcccatagaaccatatcattttgctgtaacatgctcttgtcgaattcaaatctataaccctataactaagttagtaactaaaaatctgaataaatttaaggagcatgcttatggtggtacatttcgtaaagatggaagattaatttgtgcgggcggaaaggagcataatgtcaaattatttgacgtggctacaaaaagccctttaagaatattcaatgttcatagtgcaccggtccacaggacgttttttactattgatgggacacacataatttcgttttcagatgataaaacaacatcacttttggatatacccagcgaaaaaaaagtggtttgttttaaagaacataatgattatgtacgagcgggtagtgttagtcctatatcctctgatatttatatatcaggaggttatgataaaattgtcaatatgtatgatacaagaactaataaaaaagtattgagtgttaatcatgatgcacctattgaaagcgtcatttttctaccaagtggaggagtatttttatcagctggtggaacggaaattcgagtgtgggactgttttgctaatggtcgtctattagctaaaatatctcaacatcacaagacaattacttgtctacagattgcatgcaatggacgcagaatattatctggctcgttagataaacatgttcgaatttatgactctggaacatataaaacgttacatacttttgattatcccaatgagattcttagcataggcattagtgctgatgatgaaacgttagtgactggaatgactaatggcatgatttcgattaagcaacaagacactaaagggaaatttgtagattataataaaatatcttttcaatatgcatgtgataatttacatttaccaaatatagacactcacgtacacgagtcggcaaaagaagtaatgggaaaacacgatgcatgtttaagaaaattccagtattcaaaagctcttgatcacgtcatgataaattacatagttaataagtgtccacatataacagtagctcttttccaagagttagttcggcggcaaggtattgttcaagcactctctggacgtgacggaaaattcctaattaatattttgaaatttatcattcgaaacattggaaacattcgatttggaagagtattactagaaatagcaaacatcttaatggaaatctatgacgataaacttgaagaattgaatttagaggtacaattaacatttcggctattagcaagaaaattagaggaagaagaagatttaataaaatatttaacagagttacaaggtactcttgaaatgattctatcatcgtcagaaacaacaattatcaatacgcgatccgacgatttaacaccatcagcgactgcacaaaaaaatttgatactaaatatataa

SEQ ID NO: 11183 - protein, 496 aa, Nasonia vitripennis
MDIKKQFYPTASVVVKEFGPIDYIDFSPIEPYHFAVTCSCRIQIYNPITKLVTKNLNKFKEHAYGGTFRKDGRLICAGGKEHNVKLFDVATKSPLRIFNVHSAPVHRTFFTIDGTHIISFSDDKTTSLLDIPSEKKVVCFKEHNDYVRAGSVSPISSDIYISGGYDKIVNMYDTRTNKKVLSVNHDAPIESVIFLPSGGVFLSAGGTEIRVWDCFANGRLLAKISQHHKTITCLQIACNGRRILSGSLDKHVRIYDSGTYKTLHTFDYPNEILSIGISADDETLVTGMTNGMISIKQQDTKGKFVDYNKISFQYACDNLHLPNIDTHVHESAKEVMGKHDACLRKFQYSKALDHVMINYIVNKCPHITVALFQELVRRQGIVQALSGRDGKFLINILKFIIRNIGNIRFGRVLLEIANILMEIYDDKLEELNLEVQLTFRLLARKLEEEEDLIKYLTELQGTLEMILSSSETTIINTRSDDLTPSATAQKNLILNI

SEQ ID NO: 11184 - DNA, 1539 bp, Nematostella vectensis
  CDS (1)..(1539)
atggcgtccgagtttcacaaaattcaagtgaaacgctatccaaaagtagagaggaaacagaatagcgactccaaatactggaagaaattcagctcgcccatctttgcaagagagtatggtgcggtcacacatgtggacttctgtaattctaaacctcatgactttgctgtaactggatccacaagggtgcagatctacagctcaaccacacaccaagtcaacaagaccatttccagattcaaggaagtagcctactgtggtacatttcgcagtgatggacagctgatgatagccggaggagaagatggtctgatacagctgtttgacctaaatagtagagctgttttgagacaattcaaaggacattcagggcctgttcatgtgaccaagtttcttcaagacaaccttcacattgtgtctgcttcagacgacaaacttgtaaactgctgggacattgccactgaacagacgacagccacttataaagaacacgaagactatgtgaggacaggagtggcaagtcaagttaccagtgacatcttcttaacagggtcatacgatcacactgtccgaatgtgggacaggcgatgtaatgctagcgtgaacaccttggaccatggtgccccggtggaatgtatccaggtgtatccaaatggtgcaatggcaataacagcaggggagaatgtcatcaagatttgggacatcctaagtggaggtcggctcgtcacttcattctcaaaccaccaaaagaccatcacttctctctgctttgatggcgcttacaaacgcttgctatcaggatccattgacaggaatgtcaaggtttatgaccttcaagactacaaagttgttcacagcatggattatccatctcctattctcagcttggctgtttcacctgatgattcccacatcgttgttggcatgtcagatggcttactatcaattaagcaccgaaacaataacatggaagaaacatctaccctaccgcctcctaggccacgcccagggagcttcaaatacttcattaggggccagaactataagccaactgaggatgatgttgttgtatctgaaaaaaggaaaacctaccttaacaagtatgacaagttagtcaagaattttgagtatgctgctgctcttgatgccatactacagcctctctctaatcacccccctgtagtggttgctatattacaagagctgatacggcgaggaggactggagagagctttatcaggaagagatgaggagggactggtgcccatcttatatttcctaatacgtaatataaccaacccaagatatactgttgtcctcatcgatgttgcaaacatcctgttagatatgtattctcccataatcggtcagtctccgaacattgaccaactttttacgagcctgagagaaggcataactaaagaactagacttcagccagcaggcttgtgaactgctaggcgctttggacactatatttgccgcttcctcgtgttcacttgggacagcaagcatgccagaggtcacagaagggagatag

SEQ ID NO: 11185 - protein, 512 aa, Nematostella vectensis
MASEFHKIQVKRYPKVERKQNSDSKYWKKFSSPIFAREYGAVTHVDFCNSKPHDFAVTGSTRVQIYSSTTHQVNKTISRFKEVAYCGTFRSDGQLMIAGGEDGLIQLFDLNSRAVLRQFKGHSGPVHVTKFLQDNLHIVSASDDKLVNCWDIATEQTTATYKEHEDYVRTGVASQVTSDIFLTGSYDHTVRMWDRRCNASVNTLDHGAPVECIQVYPNGAMAITAGENVIKIWDILSGGRLVTSFSNHQKTITSLCFDGAYKRLLSGSIDRNVKVYDLQDYKVVHSMDYPSPILSLAVSPDDSHIVVGMSDGLLSIKHRNNNMEETSTLPPPRPRPGSFKYFIRGQNYKPTEDDVVVSEKRKTYLNKYDKLVKNFEYAAALDAILQPLSNHPPVVVAILQELIRRGGLERALSGRDEEGLVPILYFLIRNITNPRYTVVLIDVANILLDMYSPIIGQSPNIDQLFTSLREGITKELDFSQQACELLGALDTIFAASSCSLGTASMPEVTEGR

SEQ ID NO: 11186 - DNA, 1746 bp, Vanderwaltozyma polyspora DSM 70294
  CDS (1)..(1746)
atgtcatcgaatagacaaaaaattattatagctaaggcaccagtactgcctcaacagactacaccagagcaacgttactggcgtcagtattcttctgctcaattagtaaaagaacataatagtgttactcatgtgtattttaatccacaacatcctcacgattttgcagtcacttcttctacaagagtccaaattttttcttcaagaacaagacaagtagtgaaaacattttccagatttaaagatgtcgtttattctgcctcttttagaaatgatggtaaattgttatgtgctggtgacgctacaggtttagtgtctgtttatgatagttacaatccaagagtgttattactatcaatcaaagcctctacccatcctactcatgtaacaaaatttcatacccaagatccaaaaactttaataactgccagtgatgatagagttactagattatgggatatttctcatgcttatgagccacaaattgaacttactggtgcttctgattatgttcgtactgtctcatgtattccatcagctccacatttgatttctaccggttcttacgatggtatagtaagattatatgatactagagctagtgcctcaagtcctatttattccttaaaccacgaccaacctgtagaaaatgtcatcgctatctcaccaactcaattggtttcttgtggtggtccaaatttcaaagtatgggatttgactagtaacaagaagctatatgaacgtggtaattttaataaaacagttacttgtctggattatgtagaaaattcagaatcaccaatgcaatcagctttaattgcgtcctcattagatggtcatgttaaagtatttgatcctttggacaatttccgtgttaaatttggttggaaatactctggtcctgtattaagttgtgcattatccccaggtgatgctcaaggaaatagacatatagtagctggtttatcatcaggtctattggctattagaactaaacgtaaagaaaaacaatcaaataagcaatctactgttgcctcagttaagagtaataattttcaaagaatgatgcgtggctcccaatatcaaggtgatcaagaacatattgtgtatgatgataaaatgaaacaacaacgtcgcacaagagctttcgaaaaatacattaaccaatttaaatggagtgaagcattagatagtgcatttgttcctggtatggctaaggaactaacattgaccgttttacaagaattacgtaagcgtggtaagattcgtgtagcattgtatggtagagatgaagctgcattagaaccacttttaaattggtgtttaaagggtatagatgatgtcagatcagctcctgtagtggctgattggatcgcggtagtattggatctttacagcgatatattatttaaagcgcctgtattagaagaaatgcttattaccttgagaagtaagatcagacaagttgtttactattcgaaggaagcacagagaatagaaggagcttttgcttcttctgttttattattatcttcatcacttatcgaatctgtgaagttattttcatcttcctcgtctatttcattatcaccaagaaattcgttgagctgcttcctttttagtctgtatatttctttatggatatcgatagtcaccgatttagatatgtcactttcttcggcaaacctacgtataactcttcttctctttatttttttatttatatgttcatcaagagcctcttga

SEQ ID NO: 11187 - protein, 581 aa, Vanderwaltozyma polyspora DSM 70294
MSSNRQKIIIAKAPVLPQQTTPEQRYWRQYSSAQLVKEHNSVTHVYFNPQHPHDFAVTSSTRVQIFSSRTRQVVKTFSRFKDVVYSASFRNDGKLLCAGDATGLVSVYDSYNPRVLLLSIKASTHPTHVTKFHTQDPKTLITASDDRVTRLWDISHAYEPQIELTGASDYVRTVSCIPSAPHLISTGSYDGIVRLYDTRASASSPIYSLNHDQPVENVIAISPTQLVSCGGPNFKVWDLTSNKKLYERGNFNKTVTCLDYVENSESPMQSALIASSLDGHVKVFDPLDNFRVKFGWKYSGPVLSCALSPGDAQGNRHIVAGLSSGLLAIRTKRKEKQSNKQSTVASVKSNNFQRMMRGSQYQGDQEHIVYDDKMKQQRRTRAFEKYINQFKWSEALDSAFVPGMAKELTLTVLQELRKRGKIRVALYGRDEAALEPLLNWCLKGIDDVRSAPVVADWIAVVLDLYSDILFKAPVLEEMLITLRSKIRQVVYYSKEAQRIEGAFASSVLLLSSSLIESVKLFSSSSSISLSPRNSLSCFLFSLYISLWISIVTDLDMSLSSANLRITLLLFIFLFICSSRAS

SEQ ID NO: 11188 - DNA, 1593 bp, Aedes aegypti
  CDS (1)..(1593)
atgtccaagttcaaacaaaccaacgcgcagatatacgcgaaatcggccacggtcctttctccggatacgatctattggaagaagctgggggttccaacactggtgaaagaattcggagcgatcgactacatcgatttcagccctgtcgaaccgtacgagtttgccgtgaccgcttctgtgcgcgttcaaatctacaatccggtcacaaagctggtggtcaagaacatcagcaagttccaagagggcgcccacgggggttcatacagaagcgacggagaactactggtggccggtgatgatctggggaaagtgcgaattttcgatcccagctcgaagtcgatgttgcgttgcttcgacggccacaaagctccggtacatcgaaccttcttcaacgcagatcgccatcacgtcagcagtttttcggacgataaaactgtgagatattgggacattgccacggaaaagcacgtcagtaccttctcggaacacgcggactatattcgcgcaggatgtaccagtcccgtgagcccaaacataatcgtatccggaggttatgacaagaaaatcaacatgtacgacacgagaactaaggaaaaggtactgtcacttgatcacggaagtcctgtggaatcgcttattttcctaccaagtggaggcattttcatcagtgccggaggcacctcggtcaacgtctatgacgcactcgccggtggacgaaaaattgcccaattatcgcaacaccacaaaaccattacctgcctgcaactggccagcgacggtaaaagactcctttccggaagtctggatcgacacgtgaagatctatgatattgccacgtaccaagtggtacatacgatcgataactccaatgctgtgttgagtttgggcgtctccaaaaatgatgatacactcgtaacaggaatggttgatggtttaattgcaatccatcggcgggatgtcgataaggataaggacgatgtcgaacggaagaaatctcgacaatccaaggctcgggccaggtacgagaacatattcgaatctgctgacgagaagattggtgaattccgtcacgatagaatagagcagtttgatcgtatgttgaggcagtacgagtactctaaagcactggacagtgtcatggtgccaagcgtgatggggaaaacgccggaaaagacagtagctttgataaaggaattgattcgtaggaaaggtttggacagagcactaacaaaaaggacacatgtgtttttagtacgcttcgtgaatttcctcctgcgctacattggagactatcgattcactcccgcccttattgacgcagccaacatcctgctagacgtgtacgagtcagatttcgaacagttcgctggaaccgaggtaggaaaaatgttcataaatctttcgaaacgcttgaagaaggaagagcaaatcatcagtgagttcctggaagtccaagggctgctggagatgatttccgccgccgcggatgtcggccaagccgccaatgaagacgaagaagcagagaaagtgctggagaaggaacttcaggcttccgcgaatgcacagaagcaagcagttattaatattgattga

SEQ ID NO: 11189 - protein, 530 aa, Aedes aegypti
MSKFKQTNAQIYAKSATVLSPDTIYWKKLGVPTLVKEFGAIDYIDFSPVEPYEFAVTASVRVQIYNPVTKLVVKNISKFQEGAHGGSYRSDGELLVAGDDLGKVRIFDPSSKSMLRCFDGHKAPVHRTFFNADRHHVSSFSDDKTVRYWDIATEKHVSTFSEHADYIRAGCTSPVSPNIIVSGGYDKKINMYDTRTKEKVLSLDHGSPVESLIFLPSGGIFISAGGTSVNVYDALAGGRKIAQLSQHHKTITCLQLASDGKRLLSGSLDRHVKIYDIATYQVVHTIDNSNAVLSLGVSKNDDTLVTGMVDGLIAIHRRDVDKDKDDVERKKSRQSKARARYENIFESADEKIGEFRHDRIEQFDRMLRQYEYSKALDSVMVPSVMGKTPEKTVALIKELIRRKGLDRALTKRTHVFLVRFVNFLLRYIGDYRFTPALIDAANILLDVYESDFEQFAGTEVGKMFINLSKRLKKEEQIISEFLEVQGLLEMISAAADVGQAANEDEEAEKVLEKELQASANAQKQAVINID

SEQ ID NO: 11190 - DNA, 1545 bp, Chlamydomonas reinhardtii
  CDS (1)..(1545)
atggagtacgagccagcagaataccagaagctgcaagtgcgccagtatgcgccacgcgagctcagggagaccgccgaggggaaatactggcggcagtttaaggcaccaattatagcgaaacagtttggcggcgtcacgcacatcgacttctgccaacagtacccctataacctggccgtcaccgcgtcgacacgagttattatatacaatggccttgcgcccgcggtggtgggccgcaccatcagccgcttcaaggacatcgcctacagcggctgcttccggagcgatggccgcctcgtgtgtgcgggcgggcaggacggcgtggtgcaggtgtttgacgccaacagccgctccgtgcttcgccagttcaaactgcacaagcgcgccacgcgcgtggcccgcttcggcgccgacaagctgcacgtgctgtcgggcagtgacgacgtgacggtgcgctggtgggacgtgagcgccggcagccaggtgctgcggcttgatgggcaccgcgactatgtgcgggcggcggcggccagccccgccagtcacgacacgtggctgacgggcagctacgaccacacagtgaagctgtgggacgtgcgggcgggcggcagcgcggtgctgagtctggagcacggcgcgccggtggaggacgtggcgttcttcccctcgggctccatggcggtgacggcgggcggcaactacctgtgtgtgtgggacctgctgggcggcggcggcgggcggctgctgaagcggctggacaacttccagaagaccgtcacgtgcgtgcgcctcagcccgctggcggggccggactcagcggcggcgccgcgcatgcttgcgggctccctggacggacacgtcaagatcttcgagctggactcgttccgtgtgacgcacgcctccaagtacccggcgcccgtcatgagcctgggcctgtcacccgactgccgactgatggcggtgggcatggcggacggcaacctgagcgtgcggaaacacgcgcggcccaagcgggcaggccggcaacggcgggctccgcgcctgacggccgccaactaccgctacttcatccgcggccagaacagccgcgccgccgcctccgactaccgggtggtgcggcagcggcaggtgcggctgcaggcgtacgaccgcatgctgaggcagttcaggtaccgcgagtctctggacgcggcgctgtccacccggcagcctgaggtggtggccagtgtgctggaggagctggcggcgcgcggcggactggcgggcgcgctgggcgggcgggacgcggaggggctgctgccgctgctgcggcacctggtcaagtacatcgcagagcccaggtacactcggctgctggcgggcgtggcgcaccggctgctggacacctacagcggcgtggtgggcaccgcccccgcagttgacaaggcgctgggggtgctgcgcgaccggctggcggaggagctgggcgtgcaggaccagctgagcgggctggcgggcgcgctggagccgctgctggcggcgtcgctggcgggcgcggtgttttga

SEQ ID NO: 11191 - protein, 514 aa, Chlamydomonas reinhardtii
MEYEPAEYQKLQVRQYAPRELRETAEGKYWRQFKAPIIAKQFGGVTHIDFCQQYPYNLAVTASTRVIIYNGLAPAVVGRTISRFKDIAYSGCFRSDGRLVCAGGQDGVVQVFDANSRSVLRQFKLHKRATRVARFGADKLHVLSGSDDVTVRWWDVSAGSQVLRLDGHRDYVRAAAASPASHDTWLTGSYDHTVKLWDVRAGGSAVLSLEHGAPVEDVAFFPSGSMAVTAGGNYLCVWDLLGGGGGRLLKRLDNFQKTVTCVRLSPLAGPDSAAAPRMLAGSLDGHVKIFELDSFRVTHASKYPAPVMSLGLSPDCRLMAVGMADGNLSVRKHARPKRAGRQRRAPRLTAANYRYFIRGQNSRAAASDYRVVRQRQVRLQAYDRMLRQFRYRESLDAALSTRQPEVVASVLEELAARGGLAGALGGRDAEGLLPLLRHLVKYIAEPRYTRLLAGVAHRLLDTYSGVVGTAPAVDKALGVLRDRLAEELGVQDQLSGLAGALEPLLAASLAGAVF

SEQ ID NO: 11192 - DNA, 1572 bp, Physcomitrella patens subsp. patens
  CDS (1)..(1572)
atggaaagggggaggaaggattacgtgcccgttcgaccgaaggcgtaccctgcgtccaaaaatgcgctcacagtagatgccaagtattggaaagcattcaagattctaagcacgcctcagcacattggcgctgtcacatcaatccagttctctcctgtcgatcactacgattttgctgtctcgtcctcgactagagttactatctacgatggagtcacgggagaagtgaagaagactatttcacggttcactgacgtggcttactcaggaactttccggtccgatggtcagctccttgcagccggtggtgaaacaggaattgtacaggtatttgatcttggcagccgccaaattttgcgtcagctaaaaggacataaaggagcggtccactgggtccgatatgctcctcaggataagctacacattttttcggcaggtgacgaccgtaccgtgcggtggtgggatgtgtccacttcggaatccttgtcaactttggagggtcacactgattatgttcgttgtggtgttgcatgccctacaacgaacgacctttgggccactggatcttatgatcattcagtacgtctttgggacattcgcactcctaaatgcgtcttgcagctggagcacgggaagccactggaagatgtagttttcttcccatcaggaggtctacttgcctctgcggggggtactgaagtaaaggtatgggatatagtaggtggaggaagggaagtccaaacgctggggaatcaccagaaaactgtgacatctctcactattatgtgtcctcgtgagtccacttctgctctagaaccagacgccccaagactgttgacatcttctctggatggccatgttagagtctttgatacaagtcaatttaaggtgacacatgctgccaagtatccacacccactcttgagcatgggtttgtcggcatcatcccaaaccctagcagtagggacagcttcaggaatgcttttcgtacgtcagaaaaaagaaccgaaatccgaggaggatattgagaagccacaaaatgtattggatactacaacgcccaagaaagccaagcaactacgtccaaataattttcgctactttttgcgaggtcgctcagaacaagcatcggaaggtgatcatgtactagctcgacctcaaagacaacgtcttacggcgcaagacaagtttctacgaaagttcatgtacagagaagcgctctcttctgcgctggcaacatcagattccacggttatcgtagctgtgatggaagagttaatagctcgacgtggactggtgaaggccatttcaaatcgtgatgctcccgctctcgaacctctgctcgcatttctatgcaaatatattgtgatgccaagacaggcgagacttctaattccagttgcccatctagttcttgacacctactctgaatctctcggactttcaccgacgataacacatcttgtatgcgtgctgaaggatcgagttcaatctgaagtgaagcttcacatggctttacagtccttgcaaggaattatggagcctcttattcaagcgtcttcgcaaatttag

SEQ ID NO: 11193 - protein, 523 aa, Physcomitrella patens subsp. patens
MERGRKDYVPVRPKAYPASKNALTVDAKYWKAFKILSTPQHIGAVTSIQFSPVDHYDFAVSSSTRVTIYDGVTGEVKKTISRFTDVAYSGTFRSDGQLLAAGGETGIVQVFDLGSRQILRQLKGHKGAVHWVRYAPQDKLHIFSAGDDRTVRWWDVSTSESLSTLEGHTDYVRCGVACPTTNDLWATGSYDHSVRLWDIRTPKCVLQLEHGKPLEDVVFFPSGGLLASAGGTEVKVWDIVGGGREVQTLGNHQKTVTSLTIMCPRESTSALEPDAPRLLTSSLDGHVRVFDTSQFKVTHAAKYPHPLLSMGLSASSQTLAVGTASGMLFVRQKKEPKSEEDIEKPQNVLDTTTPKKAKQLRPNNFRYFLRGRSEQASEGDHVLARPQRQRLTAQDKFLRKFMYREALSSALATSDSTVIVAVMEELIARRGLVKAISNRDAPALEPLLAFLCKYIVMPRQARLLIPVAHLVLDTYSESLGLSPTITHLVCVLKDRVQSEVKLHMALQSLQGIMEPLIQASSQI

SEQ ID NO: 11194 - DNA, 1635 bp, Phaeosphaeria nodorum SN15
  CDS (1)..(1635)
atggcggccgaggttcaactgctgcagccgctcaagctgccaaaaggcccctcgacactgacctcggagcaaaaatactggaattcgtacgcgtcggaattgcgactcgacccgtcgcagcactcgtcgcctgtcacccacatctcgataccgcctcctccgccctcgagcctgcaaaccgcggcgcaagacctcttcgccgtcaccacaggatcgcgcgtgcaaattttctcgtccaaaacgagaaaagtggtaaagaccatctcgcggttcggtgtcgatgacattgcgcactcgggtaacatacggcgcgatggccgcatattggtcgcaggaggcgaaagcggtgccatacaggcctttgacgtgaagagcagggccattttgaaaacatggaaagagcacaagcagcctgtgtgggtgacgcaatggcatccgaccgagctcaccaacctcatgagctgttccgacgacaggacagtgcggctatgggatctgccgagtgacaagagcatgacgaaattcgacggccatcaggactatgtgcgctgcggtgccttcatgccggcgcagagcggactgctggtctcaggtagttatgatcagacggtgcgcctctgggactcgagagcaggcggcaaggcagtcatggtcttcaagcacgccgcccctatcgaggccgtcttgcccatgccttccggtaccgccgttctcgcctccagcgacaatgccatcagtgtccttgacctcattgccgcaaagccaatccacatgctgcgcaaccaccagaagaccgtcaccgccctgacccttgccaacaacggcgaacgcctcctctccggcgcgctcgacgggcacgtcaaggtgtttgagaccacaggctggaacgtcgtgggaggcctcaaatacccgtctcccattctctccctcagcgtcattcccagccaaaatgaagacaagcacattgctgtcggtatgcaatcgggtctcttatcactcaaaactcatctttcgggcgaacaaaaggcccaagcacgcgaacgcgagaaggagatgaaggccttgatggagggcaagattgaagagtacgaccgcggtaagaagcgaaagcgcggcgcgggctgggagaagcgacttcgtggcaaagactacaccggcgaaagcgcggacattgtcattgagggaaatgcgaggggaaagattacaaagggaacagcatgggcgcatgcgttaagggcggcccagtatgcaaaggctttggatttagtcttcgaagtcaaggaccacaacgcacgcgaccaacacctctctctcctcaccgcactacgtcaccgctctgcgcttcggactgccttgatgaacagggacgaagtcacgctccaacccatcttgcgctggatcatcaagaatatttccgactaccgcatcacgcagctgaccacggatgttgctcttgtcgtactcgacctctacgccgatcagctgggtcgaagcgaggagattgatcaacttgtttcagcactaatgaatcgggtcaaggtcgccgtagatgcaagtcaaagtgcatggagtgtacagggtatggtagatatgcttacagcaagtgtcggcatcgaggaagttgtcgaggcgtaa

SEQ ID NO: 11195 - protein, 544 aa, Phaeosphaeria nodorum SN15
MAAEVQLLQPLKLPKGPSTLTSEQKYWNSYASELRLDPSQHSSPVTHISIPPPPPSSLQTAAQDLFAVTTGSRVQIFSSKTRKVVKTISRFGVDDIAHSGNIRRDGRILVAGGESGAIQAFDVKSRAILKTWKEHKQPVWVTQWHPTELTNLMSCSDDRTVRLWDLPSDKSMTKFDGHQDYVRCGAFMPAQSGLLVSGSYDQTVRLWDSRAGGKAVMVFKHAAPIEAVLPMPSGTAVLASSDNAISVLDLIAAKPIHMLRNHQKTVTALTLANNGERLLSGALDGHVKVFETTGWNVVGGLKYPSPILSLSVIPSQNEDKHIAVGMQSGLLSLKTHLSGEQKAQAREREKEMKALMEGKIEEYDRGKKRKRGAGWEKRLRGKDYTGESADIVIEGNARGKITKGTAWAHALRAAQYAKALDLVFEVKDHNARDQHLSLLTALRHRSALRTALMNRDEVTLQPILRWIIKNISDYRITQLTTDVALVVLDLYADQLGRSEEIDQLVSALMNRVKVAVDASQSAWSVQGMVDMLTASVGIEEVVEA

SEQ ID NO: 11196 - DNA, 1626 bp, Aspergillus oryzae RIB40
  CDS (1)..(1626)
atggctgcccccgtcctccctctccaacaggtcaagctcccggcgctgccctcgactcgcttgacaccagagcagcaatattggaagacattcaagaaccctctgctgatcccctcgcccgccaatggccctgtcaatctcatcacacagccttccgctccgtcctccgcctccgccttcccatctctcacccagcctcccgatgtcttcaccgtgaccaccggtgcccgagtccaaatttactctattcgcacccggaaactcctccgcaccgtcactcgcttcgatgataccgtacgcggtaccgatgttcgtcccgacggccgtgtgtttgttgctggtgacgacaccggtgcgctccaggtgttcgatgtcaactcgcgcgcgatcttgaagtcatggagggagcacaagcagccggtctgggtcagcaagttctcacccagcgacccgacatctcttttcacggcgagcgacgaccgcaccgtgcgactttgggacctcccgagcgaaaacagcgtaaagacgttcgtgggccataccgattatgtgcgcagcggtgcattcatgccggggtcactggcgtcttcgggactcctggtgtcaggtagttatgatcgtactgtgcgcctgtgggatccgcgcgtggagagtcggtccgcgatgaccttcaagatggctgccccgattgagagcgtcctgccgatgccgacgggcactacggtacttgcggcggccgataacaagattgctgtgctggatattgtggccggaaagcctctgcatatgattcagagccaccagaagactgttacggcgctagcgttggcttccaatggcgagagactgctgagtggtgctttggacggtcacatgaaggtgtttgagacgactggctggaatatggtctctggatccaagtacccctcgcccatcctttcgctccgcgccattacgtctggaccagcgcaggaggataagcacatcgcagttggtatgcagtccggtctgctgtcgatcaaaacccgtctctccggccagcagaagatcaaggagaaagagcggaggaaggaaatgcaggccttgctggagggcaagttggaggaacatgaccgtaaagtggccaagcaaaagaagctccggggctccggttgggaaaagcgtttccgtggtcgtgatttcattggtgagggcgtggacataatcattgaaggccaggatcgcaaacggaagaaggaacagccttgggagcacgaccttcgcaaggcccgctattccgccgccctggaccaagtgctggcttcgggcgacaagaccgcgcaacttactcttctgaccgcacttcggcaccgttcggctctccgcgcatccttacaaaaccgcgacgaagttaccctgcagccggtgctgcaatgggtgaacaagagcatcggcgagcctcgcttggtgaaactcagcgtcgaggtggccatgaacgtcctcgatatttattcaggaaacttgggccaatccgcaacgattgataagatggttgaccgactgcaccgacgcgtgcgagacgaagtggaaatggctcaccaagcatgccagaccaagggcatgctcgacatgttgaaggcggcctaa

SEQ ID NO: 11197 - protein, 541 aa, Aspergillus oryzae RIB40
MAAPVLPLQQVKLPALPSTRLTPEQQYWKTFKNPLLIPSPANGPVNLITQPSAPSSASAFPSLTQPPDVFTVTTGARVQIYSIRTRKLLRTVTRFDDTVRGTDVRPDGRVFVAGDDTGALQVFDVNSRAILKSWREHKQPVWVSKFSPSDPTSLFTASDDRTVRLWDLPSENSVKTFVGHTDYVRSGAFMPGSLASSGLLVSGSYDRTVRLWDPRVESRSAMTFKMAAPIESVLPMPTGTTVLAAADNKIAVLDIVAGKPLHMIQSHQKTVTALALASNGERLLSGALDGHMKVFETTGWNMVSGSKYPSPILSLRAITSGPAQEDKHIAVGMQSGLLSIKTRLSGQQKIKEKERRKEMQALLEGKLEEHDRKVAKQKKLRGSGWEKRFRGRDFIGEGVDIIIEGQDRKRKKEQPWEHDLRKARYSAALDQVLASGDKTAQLTLLTALRHRSALRASLQNRDEVTLQPVLQWVNKSIGEPRLVKLSVEVAMNVLDIYSGNLGQSATIDKMVDRLHRRVRDEVEMAHQACQTKGMLDMLKAA

SEQ ID NO: 11198 - DNA, 1560 bp, Coprinopsis cinerea okayama7#130
  CDS (1)..(1560)
atggactatcagccagtcgccgtcaagaaacatcttaaaccagccgcatccaagcactctccagaatccaggcattggcgccaatttaaacacccagtctttgtcaaggaatatgctccaatcacctccatacatttctctccctcgaaaccacatcgatatgccgtgaccgccgccaccagagttcaaatttacgcgcccagaacccagaaaatcacaaaaactatttctcgtttcaaggacgttgcgagaagtggaaacattcgtgcggatgggaaactggtggttgcaggtgatgatagcggcctcattcagatattcgacatcaactcaagagctatcctccgcacgctggactcgcacaagcagcccgttcatgtcactaaattctcccctcttgaatccacccgcgtcctctcatgttcagatgacaacactgtcaagttctgggacctcacttcacaaacggcaatttcgacgttcgacgaacataccgactatgttcgcacaggacaggtctcaacgtccaacccacatcttatccttaccggttcatatgatggcacagctcgactttttgattcgcggacaggacagtccgagatggtaatgggggaaagcatcacagccaacctcaaggcaccggtagaacaagtgctcatgttcccttctggtactgtcgctgtttcttctgcaggccctattcttcgagtatgggacttggttgctggaggccggtgtataaaggccatgtcaaaccatcagaaaaccgtaacagctctcgccctcaatccttctgctaaccgcctgctcagcggaagtctggaccacatgctcaaggtgtacgacgtctcggactatagggttgtgcacaccatgcggtaccccgcgccattactttgtctagccatttcgccggacgattctcacatcgttggtgggatgtcggatggaacgctgtccattcgaagaagacagaaaaagggcaaggaaattgccacattcggtcctgaatctcttgacttgatgtacctcggcgaaggcgttactaagagcaaagcgaaatcaaaggcgttgaaggatgttgatgaactccgtgtgagcgagagtcgtcgacagaagcgcctgaaaaactatgacaagtaccttaaaaacttcaagtactctgcggctttggattctgttctacgaaaaaatgtcccgccagcaacagtgttctctcttatccaggaattgattcaccgggacggcctcaaggttgcattagcagggcgagacgatgttcttttggaacctgtgctgcaacttttgataaaacatgtcgccgatccgcggtttggaaatactgtttgttatgtggctggcatagtgctcgacatgtaccgaccggttattggccaatctcccttgatcgactcactattcctgaggttaaggaagaagttggcaatggaactacgatttcagaaggagcttctcaaggccaagggtgctatcagcatgatcctgacatctgccttaggcaatccagaacctgtcgattcggcaagggctgcatag

SEQ ID NO: 11199 - protein, 519 aa, Coprinopsis cinerea okayama7#130
MDYQPVAVKKHLKPAASKHSPESRHWRQFKHPVFVKEYAPITSIHFSPSKPHRYAVTAATRVQIYAPRTQKITKTISRFKDVARSGNIRADGKLVVAGDDSGLIQIFDINSRAILRTLDSHKQPVHVTKFSPLESTRVLSCSDDNTVKFWDLTSQTAISTFDEHTDYVRTGQVSTSNPHLILTGSYDGTARLFDSRTGQSEMVMGESITANLKAPVEQVLMFPSGTVAVSSAGPILRVWDLVAGGRCIKAMSNHQKTVTALALNPSANRLLSGSLDHMLKVYDVSDYRVVHTMRYPAPLLCLAISPDDSHIVGGMSDGTLSIRRRQKKGKEIATFGPESLDLMYLGEGVTKSKAKSKALKDVDELRVSESRRQKRLKNYDKYLKNFKYSAALDSVLRKNVPPATVFSLIQELIHRDGLKVALAGRDDVLLEPVLQLLIKHVADPRFGNTVCYVAGIVLDMYRPVIGQSPLIDSLFLRLRKKLAMELRFQKELLKAKGAISMILTSALGNPEPVDSARAA

SEQ ID NO: 11200 - DNA, 1578 bp, Culex quinquefasciatus
  CDS (1)..(1578)
atggcggactttaagaagatcaacgcgcaaatatacgccaaaaccgccaccacattctcaccggacacaatctactggaagaagcttggagttccgacgctcgtgaaggaatttggcgcaatcgattacatcgattttagtccggtggagccgtatctgtttgcggtgacggcgtccgttcgcgtgcagatctacaacccggtcacgaagctagtcgtgaagaacattaccaagttccaggagggtgcccactgcggttcgttccgaaacgatggaaacctgctggtggctggcgatgacctcggcaaggtgcgactgttcgatgtgtccacaaagtcaattctacggttcttccagggccacaaagcacccgttcacaggacgttcttcaacgccgatggccaccacgtgagcagcttctccgatgataaaaccgtgcgttactgggacattgccacggagaaacatttggccacatattcggagcactcggattacgtccgggcgggttgtacgagcccggttagtccgaatataatcctgtcgggaggatacgaccggaagatcaacatgtacgacaccagaaccaacgaaaaggtgctctcgctggaccacggaagtccggtagagtcgttgattttccttcccagtggcggtatctttatcagcgcaggaggcacctccgtcaacgtatacgatgccttggccggaggacgcaagattgctcaactgtcgcagcaccacaaaaccgtaacctgtttgcaactggccagcgaagggaaacggctgctctccggaagcttggaccgacacgtgaagatctacgacattgctacgtaccaggttgttcacacgatcgacaacacgaacggagtgctgagcttgggagtgtccaaaaatgacgacaccctcgtgacgggaatggtcgacggacttatagccatccaccgaagggacagcgacaagggcaaggacgaggaagagaagggcaaagctcgcagcaaaagtcgcgcccggttcaacaacattttcgaaagcgcggatcagcaaatcacggatttccgacacgataaaattgaacagtttgatcgcatgttgaaaaagtacgaatacaaccgcgcgctggacagcgtgtttgtcgcgagtgtcatgggaaagaccccggaaaaaacggtcgccctcatcaaggaactcatccggcggaaaggattgcagcgggcactgaaggaccgaaagcattcgtttctggtaaagttcatcggttttgttttgcgccacatcggtgactaccggtttacgcccaccctggttgacgcagccaacatcctgctggacgtgtacgaggaagagtttggccaatttgccggaactgacgtcggtaaaatgtttatcaatctgtcgcgaagactgaaaaaggaggagaaaattttgaacgagtttctcgaggtgcaaggactgctggaaatgatatcggccgcagccgacctgaaccagccagcactcggagatgaggaaaaggaaagtgacctgcaagtttcgctgtcggcccagaagcaaggggtaatcagtgttgaatga

SEQ ID NO: 11201 - protein, 525 aa, Culex quinquefasciatus
MADFKKINAQIYAKTATTFSPDTIYWKKLGVPTLVKEFGAIDYIDFSPVEPYLFAVTASVRVQIYNPVTKLVVKNITKFQEGAHCGSFRNDGNLLVAGDDLGKVRLFDVSTKSILRFFQGHKAPVHRTFFNADGHHVSSFSDDKTVRYWDIATEKHLATYSEHSDYVRAGCTSPVSPNIILSGGYDRKINMYDTRTNEKVLSLDHGSPVESLIFLPSGGIFISAGGTSVNVYDALAGGRKIAQLSQHHKTVTCLQLASEGKRLLSGSLDRHVKIYDIATYQVVHTIDNTNGVLSLGVSKNDDTLVTGMVDGLIAIHRRDSDKGKDEEEKGKARSKSRARFNNIFESADQQITDFRHDKIEQFDRMLKKYEYNRALDSVFVASVMGKTPEKTVALIKELIRRKGLQRALKDRKHSFLVKFIGFVLRHIGDYRFTPTLVDAANILLDVYEEEFGQFAGTDVGKMFINLSRRLKKEEKILNEFLEVQGLLEMISAAADLNQPALGDEEKESDLQVSLSAQKQGVISVE

SEQ ID NO: 11202 - DNA, 1554 bp, Laccaria bicolor S238N-H82
  CDS (1)..(1554)
atggaatatcaaccagtcctcgtcaaaactcatccacgtccatcttcctcaaaacacaacccagaatcgaggtattggcgtcaattcaaacatcctgtttttgtgaaggagtatgcgccaattacctcgattcacttttctccatcaaaaccacacagatatgccgtgaccgctgccacaagagttcaaatctacgctccccgtactcaaaggatcaccaagacaatctcccgtttcaaggacgttgctcggagcgccaatatccgtcaagacggcaaacttgtcgttgcaggagatgacagcggcttggtgcaagttttcgacatcaattctcgtgcaattcttcgaactctggatgcacacaaacaaccagttcacttaactcgattctctcttttggcacctacacaagtgttgtcttgctccgatgacacgtcagtaaaactttgggatataccctctcaaacggccatctcaacgttcacggatcataccgactacgttcgctgtggccaggtatcaacgtctaatcctcatatcgtcttaactggctcttacgatgccaccgtaaggctctttgactctcggacgggccagtgtgagatgaccatgagggaacctgagtcagcaggggacacagtcaaaacgccggttgagcaagttttaatgttcccttctggaaccgtcgcaatctcatctgcgggccccatccttcgcgcatgggatatggtcgcaggaggccgctgtgtaagggccctatcgaatcaccagaagaccatcaccgcgctagcgttcaatggatccgctaaccgtcttctgacgggtagtctagatcatatggtcaaagtctacgacgtcagcacatatcaggtcgttcatactatgcgataccctgcccctattctctgtttggctatatcacccgacgagacacatttagccggagggatggcggacggcaccctctcaattcgaagacgacagcataaacccgaagaagcggatgtgacttttaacttaaccaattttataggttatgaaacgacgaaaacgaacggaattgagcacaaaccttcttgggacaacgacgaactacggatagagagtcggcggatgaagcgcctgaaagagtatgacaaacttttgaaggcattcaaatactctgccgcgttggactcggttcttcgaaaacaagttccaccaacgatatcgttttcgcttattcatgaactcattcatcgagatgggttaaaggctgccttggcagggcgtgacgacgttttattggaacctgtactcagactccttctgaagtatgccactgacccgcgctttggagacattgtttgcacaatcgccagcattgttatcgagatgtatcgaccagtactaggacaagccccgctaatcgatagcttgtttcttcggttacggaaaaaagtcatagcagagatccggttccagaatgagttaattaaaacctcggggacgttggctatgatattttcctccactctgttggatagcaaattatccaactcctccatcccatga

SEQ ID NO: 11203 - protein, 517 aa, Laccaria bicolor S238N-H82
MEYQPVLVKTHPRPSSSKHNPESRYWRQFKHPVFVKEYAPITSIHFSPSKPHRYAVTAATRVQIYAPRTQRITKTISRFKDVARSANIRQDGKLVVAGDDSGLVQVFDINSRAILRTLDAHKQPVHLTRFSLLAPTQVLSCSDDTSVKLWDIPSQTAISTFTDHTDYVRCGQVSTSNPHIVLTGSYDATVRLFDSRTGQCEMTMREPESAGDTVKTPVEQVLMFPSGTVAISSAGPILRAWDMVAGGRCVRALSNHQKTITALAFNGSANRLLTGSLDHMVKVYDVSTYQVVHTMRYPAPILCLAISPDETHLAGGMADGTLSIRRRQHKPEEADVTFNLTNFIGYETTKTNGIEHKPSWDNDELRIESRRMKRLKEYDKLLKAFKYSAALDSVLRKQVPPTISFSLIHELIHRDGLKAALAGRDDVLLEPVLRLLLKYATDPRFGDIVCTIASIVIEMYRPVLGQAPLIDSLFLRLRKKVIAEIRFQNELIKTSGTLAMIFSSTLLDSKLSNSSIP

SEQ ID NO: 11204 - DNA, 1632 bp, Pyrenophora tritici-repentis Pt-1C-BFP
  CDS (1)..(1632)
atggcggccgaggtacaacttttgcagcctttgaagctgcccaaaggcccttccaccatcacatcggaacaaaaatactggaattctttcgcctccgagctgcgactcgacccatcccagcattcgtcgcctgtaacccacatctcaataccgccgcctcagcctgcaaatgccctgtctgctacgcaggatctcttcgccgtaaccacaggttcgcgcgtgcagatcttctctaccaaaacccggaaagtggtaaagacgatatcgcgcttcggtgtggacgacgttgcgcgttcgggcaacattcggcgcgatggcaggatcttggtcgccggaggagacagcggcgttatacaggcttttgacgtgaaaagtagggcgattttgaagacatggaaggagcacaagcagccagtgtgggtcacgcaatggcaccccacggacctcacgggtctcatgagttgttcggacgacagatcggtacgactatgggatctgccgagtgagaagagtgtgatgaagttcgatgggcatcatgattatgtgcgcagcggcaccttcatgcctgcacagagtggactgctggtatcaggaagttacgacggtacagtacggctctgggattcgcgagttggcggcaaagctgtcatggtgttcaagcacacaaaccccatcgaaaccgttctgcctatgccctctggaactgccgtccttgcatcctcagacaatgtgatcagtgttctcgacattgtagccgcgaagccgattcatatgctacgcaaccatcagaagactgttaccgcactttcgctagcaaacaacggtgagcgccttctttctggtgccctggacggccatgtcaaggtattcgaaactaccggttggaacgtcgtgggtggcttgaaatatccctcgccgattctgtccctcaacgtcattcccaaccagaaggaggacaagcatatcgctgtgggtatgcaatccggtcttctttccatcaagacacacctttcaggcgagcaaaaggttcaagctcgggagagagagaaggagatgaaggcgctcatggaaggcacaattgaagagtacgacaagagcaagaaaaggaagcgggggaaaggctgggagaagcgtattcgaggcaaggactttacaggcgaaagcgctgatattgtcatcgaaggcaacgcgcgaggcaagataactgctggacaaggatgggcgcatgcgctgcgaaggggcatgtacgcccaagccctcgatctggttctcgactcaaaagatggcaactcacgcagccaatctatcactctcctaaccgctttgcgccaccgttccgccctccgcgtcgccttgagcaaccgcgactcagtcactctccaacccattctccgctggtgcatcaggaacatctcagactaccgcattacgcgcttgactaccgatgtcgcgctcgtcgtcctggatctgtatgcagaccagttgggcaggagcgaggaggtggatgatctggttctggcgctcatgcagagagtcaaggtcacggtcgaggctagccaggatgcatggaaagtgagaggaatgctggacatgcttgtcagtagcgttggggcagtcgagggcgaagcgtga

SEQ ID NO: 11205 - protein, 543 aa, Pyrenophora tritici-repentis Pt-1C-BFP
MAAEVQLLQPLKLPKGPSTITSEQKYWNSFASELRLDPSQHSSPVTHISIPPPQPANALSATQDLFAVTTGSRVQIFSTKTRKVVKTISRFGVDDVARSGNIRRDGRILVAGGDSGVIQAFDVKSRAILKTWKEHKQPVWVTQWHPTDLTGLMSCSDDRSVRLWDLPSEKSVMKFDGHHDYVRSGTFMPAQSGLLVSGSYDGTVRLWDSRVGGKAVMVFKHTNPIETVLPMPSGTAVLASSDNVISVLDIVAAKPIHMLRNHQKTVTALSLANNGERLLSGALDGHVKVFETTGWNVVGGLKYPSPILSLNVIPNQKEDKHIAVGMQSGLLSIKTHLSGEQKVQAREREKEMKALMEGTIEEYDKSKKRKRGKGWEKRIRGKDFTGESADIVIEGNARGKITAGQGWAHALRRGMYAQALDLVLDSKDGNSRSQSITLLTALRHRSALRVALSNRDSVTLQPILRWCIRNISDYRITRLTTDVALVVLDLYADQLGRSEEVDDLVLALMQRVKVTVEASQDAWKVRGMLDMLVSSVGAVEGEA

SEQ ID NO: 11206 - DNA, 1533 bp, Acyrthosiphon pisum
  CDS (1)..(1533)
atgacttcatttaaaaaatcatttgtgaaaccgtttgctcgtcccagtgagttgtatactgtcgaagactcttattggaaaaaactcactagccctgtattggtcaaagaatttggtcccatagactatgtacatttttcacgacgtgcaccctatcattttgcaatatcatgttctgctcgagtccaagtttataatcctgttacaaaagtagtaactaaaaatctcaataaatttaaagaagctgcttatggcgcaacatttcgttcagatggccagttattatgtgctggtggcgaggaatctattgtgagattatttgaagttaatacaaagtctatgttgagacagttcagaggacataaagctgctgttcaccgtacatatttcacaagagacggccaccatattgcaagcttttcagatgacaaaactgtttctttatgggatataagtagtcagcaaataagtggacattatgaaggatatcataaggactatattagagcaggatgtgtttctccagtttctgaaaatatagttgtttctggtggctatgacaaacaaattaatatgtttgattcaagaactaaatcagtaactatgtcggttgaccacgagtcacctgtagaaagcttaatatttttaccatctggaagcttacttatatcagctggtggtactgaggttcgtatatgggatgttttagctggtaaattattggctaaacttactcaaaaccataagactgtaactgcgttatgcttagctaagcaaggtacatctatcgtaactgcctcattggacaaacatgttaagatttacaatgtatcaacattccaattgtcacatgatattacatatccaagtgcagtacttagtattgatataagtgttaatgacaaaacaattgtagctggaactgtggatggaattgtgaacataactaaacgtgatacatcagtgaaacataacaatgaaaataaaaagaggcaagctagagctgcagcgattgtccaatctgatggtattgatatgagcgtcccaataatgcaacctgatcagatgagcaagtttgatactgctctaagaaaatttaattatagccaagcattagatttggtcttagttcatgcggtcgcattcaagaaaccccatataacagtttatgtgtttgatgaattatgcaggagaaatggcttagtgcaagcaatatctggtagaaattcaaaacaattagcatttttattgaattttattgttcggtatattggagttagaaaattatctaaaacattgacacatgttgcttcaacagttattgattgttactgggattcttttgacacatgtacccttgaagttcgtgcactgctgacaaaattacatactgttgttgaaaatgaaatattactaactaaaagattgttagctattgatgggttagttaaaatgttaattattagttctgaagtattacctgatgctactcagactacaaaaattgatagtaaaagtgttgttaaaaattaa

SEQ ID NO: 11207 - protein, 510 aa, Acyrthosiphon pisum
MTSFKKSFVKPFARPSELYTVEDSYWKKLTSPVLVKEFGPIDYVHFSRRAPYHFAISCSARVQVYNPVTKVVTKNLNKFKEAAYGATFRSDGQLLCAGGEESIVRLFEVNTKSMLRQFRGHKAAVHRTYFTRDGHHIASFSDDKTVSLWDISSQQISGHYEGYHKDYIRAGCVSPVSENIVVSGGYDKQINMFDSRTKSVTMSVDHESPVESLIFLPSGSLLISAGGTEVRIWDVLAGKLLAKLTQNHKTVTALCLAKQGTSIVTASLDKHVKIYNVSTFQLSHDITYPSAVLSIDISVNDKTIVAGTVDGIVNITKRDTSVKHNNENKKRQARAAAIVQSDGIDMSVPIMQPDQMSKFDTALRKFNYSQALDLVLVHAVAFKKPHITVYVFDELCRRNGLVQAISGRNSKQLAFLLNFIVRYIGVRKLSKTLTHVASTVIDCYWDSFDTCTLEVRALLTKLHTVVENEILLTKRLLAIDGLVKMLIISSEVLPDATQTTKIDSKSVVKN

SEQ ID NO: 11208 - DNA, 1620 bp, Drosophila ananassae
  CDS (1)..(1620)
atgatgcaaactaacttcctcccgttgaacataagaaggttccagcagcgggcacaggtggagaccccagacacggtatactgggagcggttatcgaaaccagacctcctcaaggaacacaacaccatcgactacatagacttcagtctcacggatccggacaacttcgtagtcacctgctcggtgcgagtacagatctacaacctggtcacaaagctggtggtgaagaacctttccaggttccagaaaacagcctatggagcgacgttcaggcaggacggtcggctgctggccgccggcgacgaagaaggccacgtgaagctctttgacacaacgagtaggaacatcctccggctgttcaaaggacacaccgctccagtgcatcgcaccttcttcacggcggacaaactgcagctagccagcttctgtgacgacaagtccatccgtctgtgggacgtcgccaacgagaaggtggtccagacctacgaagatgcccattcggactatatccgggctggcgccatgcatcccctggcatcgaatgtgttcgcctccggcggctacgatggcaagatccatctctacgacacaagagctgagaatgcggtacagcagaccctggatcatggtgcacctgtggaatccatgctgttcctgcccaatggctcggtgcttgtcaccgccggcggcaaccaggtccgtgtttgggacatgatcagcggctgccggctgctcaccaccatggcccagcaccacaagaccgtgacgtgtctccggctgggatcagatggccggcgtctgttctcgggcggcctggaccgccacgtcaagatctacgacgtcagtacgtacaagacagttcacacgctcacctatcccaatgcggtggttagcttgggagtggctagcggggatcaggctgtggtagccggtatggtcgatggcctggtctccattcgtcggatgaccgttgacagcaagccgagtcacttgaagaagatccgtacctcgcggtcaaagaatgtggagcgcaagcggccaactcctcgtccaactatcccacaagatgtggatcatgtcgtcaaggatcgtgtgaaaggacccggcctgaaaatctacgacgtacagctgcgacagtttaaccataagaaggcactggacaatgttatgtatctgcagaggatggagaagcagccagaactggtagtggcggtgatcacagacctactgcatcggagatccctggacaaggcgctgatagatcggccggagcacattctcatcaagtttattgactttgtctgcgcccacctctccgaaacacgtttcatgcgacccctgatgaacgccgccagcactgtcctggacgtcttcgaacggcagctggtgacctgcagcgatttgctattaaagtctctggagaagctatcccggacggtgcagaacgagattcaactgacaacagagcttatccagctgaagggcgccatggatatgctgataggcgtctccctggagggcgatgagacgaggcaccggcccacctacgtccagccgacgagggcgcccaagatgcagccctcacaggcggcggagaagtatgtggtctttgtggagtga

SEQ ID NO: 11209 - protein, 539 aa, Drosophila ananassae
MMQTNFLPLNIRRFQQRAQVETPDTVYWERLSKPDLLKEHNTIDYIDFSLTDPDNFVVTCSVRVQIYNLVTKLVVKNLSRFQKTAYGATFRQDGRLLAAGDEEGHVKLFDTTSRNILRLFKGHTAPVHRTFFTADKLQLASFCDDKSIRLWDVANEKVVQTYEDAHSDYIRAGAMHPLASNVFASGGYDGKIHLYDTRAENAVQQTLDHGAPVESMLFLPNGSVLVTAGGNQVRVWDMISGCRLLTTMAQHHKTVTCLRLGSDGRRLFSGGLDRHVKIYDVSTYKTVHTLTYPNAVVSLGVASGDQAVVAGMVDGLVSIRRMTVDSKPSHLKKIRTSRSKNVERKRPTPRPTIPQDVDHVVKDRVKGPGLKIYDVQLRQFNHKKALDNVMYLQRMEKQPELVVAVITDLLHRRSLDKALIDRPEHILIKFIDFVCAHLSETRFMRPLMNAASTVLDVFERQLVTCSDLLLKSLEKLSRTVQNEIQLTTELIQLKGAMDMLIGVSLEGDETRHRPTYVQPTRAPKMQPSQAAEKYVVFVE

SEQ ID NO: 11210 - DNA, 1608 bp, Drosophila erecta
  CDS (1)..(1608)
atgcagagcaccttcatcccactgaacatacggcgttttcagcagctggctcaggtggaaacgccggatacggtgtactgggaccgattggcgaaaccggaacttctccaggagcacaacacaatcgattatctggacttcagccccagccatcccgacaactttgtggtgacatgttcggtgcgcgtgcagatctacaacctgatgaccaagctcgtggtgaagaatctttcccgattccaaaagaccgcatacggagccaccttccgacaggatggtcgactcctggccgccggcgacgaggagggccacgtcaagctattcgataccactagccgcaacatcttgcgtttgttcaagggacacacggcaccggtgcatcgcactttctttacggcggacaagctgcagttagccagttttggagacgacaagtcggtccgactatgggatgtggccaacgagaaggtggtacaaacctacggggacacgcacaccgactacattcgtgctggcgccatgcatccgcaggcaccgcacatgttcgtctccggaggttacgatggcaaaatcaatctgtatgatacgcgagcggaaacggcggtgcaacgcaccttggatcacggagctccggttgagtccatgttgttccttcccaacggttcaattttcgttagcgccggtggcagccaggtacgcgtatgggatctcatcagcggctgccgtttgcttaccatgatgtcacagcatcacaaaacagtaacttgtctgcgcctgggatccgatggcaggagattgctctcaggcgggctcgatcggcatgtcaaaatctacgatgtgagcacctacaaaacaatgcacacgttgacctatcccaatgccgtggtcagcatggctgttgctggcggagatcaggccgttgttgctggaatggtcgatggtctagtctccattcgtcgcatgatggtagacagcaagcccagtcatttgaaaaggattcgtgcggagcggacacgcaggcacttcaaggatgcagtacgcccgaaccacacccaggaggttgatcacactatcaaggatcgaatcaaggggcccggattgaaatcctacgatgtacacctgcgcgtgttcaaccacaagaaggctttggacgacgtgatgaatgcgcagaagatggcaaagcagccggagctcgttgtggctgtcattaccgaccttctgcaccgtaaatctctggacaaagccctcactgatcgtcgggacacaatgcttgttcgattcatcgactttatttgcaaccacatgggggagacgcgattcatgcgcccgctgatgatggccgccagcacggtcttggacgtcttcgagcggcgattggtggcctacagcccgaagctgatgcgatccttggaacgattgtcacatgttatgcaggaggaagtgaggctaaccaccgatctgatgcggctaaagggtgccatggatatgctcattgggatttcaatggacaatggcgaagtagcccataagcccacatatgttgagactaagacaccaagcatgcagccctcccaggcggcggaaaagtacgtggtcttcgtggagtga

SEQ ID NO: 11211 - protein, 535 aa, Drosophila erecta
MQSTFIPLNIRRFQQLAQVETPDTVYWDRLAKPELLQEHNTIDYLDFSPSHPDNFVVTCSVRVQIYNLMTKLVVKNLSRFQKTAYGATFRQDGRLLAAGDEEGHVKLFDTTSRNILRLFKGHTAPVHRTFFTADKLQLASFGDDKSVRLWDVANEKVVQTYGDTHTDYIRAGAMHPQAPHMFVSGGYDGKINLYDTRAETAVQRTLDHGAPVESMLFLPNGSIFVSAGGSQVRVWDLISGCRLLTMMSQHHKTVTCLRLGSDGRRLLSGGLDRHVKIYDVSTYKTMHTLTYPNAVVSMAVAGGDQAVVAGMVDGLVSIRRMMVDSKPSHLKRIRAERTRRHFKDAVRPNHTQEVDHTIKDRIKGPGLKSYDVHLRVFNHKKALDDVMNAQKMAKQPELVVAVITDLLHRKSLDKALTDRRDTMLVRFIDFICNHMGETRFMRPLMMAASTVLDVFERRLVAYSPKLMRSLERLSHVMQEEVRLTTDLMRLKGAMDMLIGISMDNGEVAHKPTYVETKTPSMQPSQAAEKYVVFVE

SEQ ID NO: 11212 - DNA, 1548 bp, Drosophila grimshawi
  CDS (1)..(1548)
atgacgagcaatttccagccacttcatatacaaaggtttcaacagaaagtccagttggtcacaccggacacaacctactggaatcgattggacaaatcggagctgcttaaggaacactcgaacgtcgactacatcgacttcagtccgagtgagcaggataactttgtgctgacgtgttcagctcgggtgcagatctaccatctggtgacaaagctggtcgttaagaacctatccaagttccaaaagactgcatatggcgcaacgttccggcaggacggtcgcttgttggcagccggcgatgaggagggttatgtgaagctattcgacataagcagccggaatatactgcggctgttcaaggggcacacggcgcccgtgcatcgcacatttttcacggcagacaaatcgcagctggccagctttgcggatgacaaatcggtgcgactgtgggatgtgggcaacgagaagctggtgcggacgtatgaggatgcgcacagcgattatatacgtgcgggcgcttcgcatccgcaggccgggcatatgttcatctccggaggctacgatgggaaaatcaatctgtacgacgcacgggtgcaacagtcaataaccagaaccctggatcacggcagccccgttgagtccatgctattcctgcccaagggctccatattcataactgctggcggcacacagaccgtcacatgtctgcgggtgggctccgatggccggcgtctattgtcgggcggcctagatcgacatgtcaagatctatgatgtgggcacgtataaaacggtgtacaccttaacctatcccaagccggtagtcagcctgggcattgctgccaggaatcaggctctcgttgccggcatggttgatggcctggtgtccatcaagcgcatgattgtcgacagtaaaccgagtcacctcgaactgatcaaggccacccatcgccagacgcaacgcaatcggatggcgcgtcccaacacaacagcaaacgtggaccatgttgtcacggatcaacggcgaatgccacagctaacggcgttcgagaatcatctgcgtaaatacaactacaagaaggcgctggacagcgtattagtgccgaagaacactgaagattatcccgagcaaatcgtggctgtaatcaccgagctactgcatcgtagcgctttgcaggcggcattaacaaatcgaaatgaggcaacactaatccaattcattgacttcctgtgcgcccacattggcgaggtgcttttcatgcgaccgctcctcaatgccgccagaaccgtgatggatgtgttcgagaacaatgtgtttgcgtttagcaaagatatgtttgaggctctcgagcgactgaggcggacaatgcaggccgagattagactaacaatggagttggtgcagctgaaatgcgcactagaaatgattatcgagggggctctggacaacaatgaagacgacgcgaccaaagttcgcttcacacaatctgaggtgcccaaaatgcacccatcgctggcggcctccaattacgtagtccttgtcgattag

SEQ ID NO: 11213 - protein, 515 aa, Drosophila grimshawi
MTSNFQPLHIQRFQQKVQLVTPDTTYWNRLDKSELLKEHSNVDYIDFSPSEQDNFVLTCSARVQIYHLVTKLVVKNLSKFQKTAYGATFRQDGRLLAAGDEEGYVKLFDISSRNILRLFKGHTAPVHRTFFTADKSQLASFADDKSVRLWDVGNEKLVRTYEDAHSDYIRAGASHPQAGHMFISGGYDGKINLYDARVQQSITRTLDHGSPVESMLFLPKGSIFITAGGTQTVTCLRVGSDGRRLLSGGLDRHVKIYDVGTYKTVYTLTYPKPVVSLGIAARNQALVAGMVDGLVSIKRMIVDSKPSHLELIKATHRQTQRNRMARPNTTANVDHVVTDQRRMPQLTAFENHLRKYNYKKALDSVLVPKNTEDYPEQIVAVITELLHRSALQAALTNRNEATLIQFIDFLCAHIGEVLFMRPLLNAARTVMDVFENNVFAFSKDMFEALERLRRTMQAEIRLTMELVQLKCALEMIIEGALDNNEDDATKVRFTQSEVPKMHPSLAASNYVVLVD

SEQ ID NO: 11214 - DNA, 1608 bp, Drosophila grimshawi
  CDS (1)..(1608)
atgaacaatttccagccacttaatatacgaagatttcaacagaaggcgcaggttgtcacaccggacacaacctactggaaccgattagacaaaccggagctgcttaaggagcacacgaccatcgactacattgacttcagtccgagtgagccggataactttgtgctgacatgttcggtgcgtgtgcagatctaccatctggtgacaaagctggtcgttaagaacctatccaagttccaaaagaccgcatatggagcaacgttccggcaggacggccgcctcttggctgccggcgacgaggagggtcacgtgaagctattcgacacgagcagccggaatatactgcgtctattcaaggggcacacggcgcctgtgcatcgtacattcttcacggcggacaaattgcagctggccagctttgcggatgacaaatcggtgcgactgtgggacgtgggcaatgagaagctggtgcggacatatgaagatgcccacagcgattatatacgtgcgggtgctacgcatccgcaggccgggcacatgttcatctccggcggctacgatggcaaagtcaatctgtacgacacacgggcacaagagtcaataacccagaccctggatcacggcagtcccgtcgagtccatgctgttcctgcccaacggctccatattcataactgccggcggcacacaggtgcgcgtctgggacttgataagtggatgccgcctgctgacgacgatgtcgcagcatcacaagaccgtcacatgtctgcgcctgggctccgacggccggcgtctattatctggcggcctggatcgtcatgtgaagatctatgatgtgggcacgtataaaacggtgcacaccttaacctatcccaatccgattgttagcttgggcgtcgctgcgaaggatcaggctgtcgttgccggtatggttgatggcctggtgtccatcaagcgcatgattgtcgacagcaaaccgagtcacctcaaacagatcaaagccagccatcgacagaagcaacgcaatcgaatggcgcgtcccaacacaacggcaaccgtggatcatagtgtctcgggtcgacggcgaacgccccagttggcggtcttcgagcagcatctgcgtaaatacaactacaaaaaggcgctggacagtgtcctcgtgacgaagaacaccgaagatcatcccgagaaaatagtagccgtaatcaccgagctactgcatcgcagcgctctgcgggcggcattaacgaatcgaaatgaggaaacactaatccaattcattgacttcctgtgcgcgcacattggcgaggtgcggttcatgcgaccgcttctcaatgccgccagcaccgtgatggatgtgttcgagaacaatgtgattgcgtacagcaaagaaatgcacgcggctctcaagcgactgagacggacaatgcaggccgagattaggctaacaatggagctggcgcacctgaagggcgcactggagatgattatcgagggggcgctcgacaacaatgaagacgacgccaccaaagttcgcttcatacaacccaaggcgcccaaaatgcacccatcccaggcggcctccaattacgtagtcattgtcgattag

SEQ ID NO: 11215 - protein, 535 aa, Drosophila grimshawi
MNNFQPLNIRRFQQKAQVVTPDTTYWNRLDKPELLKEHTTIDYIDFSPSEPDNFVLTCSVRVQIYHLVTKLVVKNLSKFQKTAYGATFRQDGRLLAAGDEEGHVKLFDTSSRNILRLFKGHTAPVHRTFFTADKLQLASFADDKSVRLWDVGNEKLVRTYEDAHSDYIRAGATHPQAGHMFISGGYDGKVNLYDTRAQESITQTLDHGSPVESMLFLPNGSIFITAGGTQVRVWDLISGCRLLTTMSQHHKTVTCLRLGSDGRRLLSGGLDRHVKIYDVGTYKTVHTLTYPNPIVSLGVAAKDQAVVAGMVDGLVSIKRMIVDSKPSHLKQIKASHRQKQRNRMARPNTTATVDHSVSGRRRTPQLAVFEQHLRKYNYKKALDSVLVTKNTEDHPEKIVAVITELLHRSALRAALTNRNEETLIQFIDFLCAHIGEVRFMRPLLNAASTVMDVFENNVIAYSKEMHAALKRLRRTMQAEIRLTMELAHLKGALEMIIEGALDNNEDDATKVRFIQPKAPKMHPSQAASNYVVIVD

SEQ ID NO: 11216 - DNA, 1605 bp, Drosophila mojavensis
  CDS (1)..(1605)
atgactagcttccagccacttaatatacgacgatttcaacagaaggcgcaagtggtcacgcccgatacaatttactgggatcgtttagcgaaacccgaactgctgaaggagcatacaacgatagactatattgacttcagtcccagtgaaccgagtaactttgtgctgacctgttcggtgcgtgtacaaatctacaatctggtgaccaagcttgtggtcaagaacttgtcacgtttccaaaagaccgcatacggcgctaatttccgtcaggatggtcggctgctggccgccggcgacgaagaaggacatgttaaaatcttcgacacgaccagccgtaacatattgaggttattcaaaggccacaaagcgcccgtgcatcgcgccttcttcaccgccgacaagctccagctggcaagcttcgcggacgataaatccgtccggctctgggatgtggcgaacgagaaagtggtgcaaacatatgaagatgcacacaccgattatataagagccggtgcaatgcacccgcagtcatctcacatgttcatctccggcggctacgatggaaaaatcaatctgtacgacacacgcgccgagaaagccatcacccatactctggaccatggcagtccagtggagtcgatgctgtttctgcccaatggttcgatattcatcacggccggcggcacacaggtgcgtgtttgggacttgattagcggcagtcgcctgctgacgaccatgtcgcagcaccacaagacaatcacttgcctgagccttggctctgatggccgacgcctgctgtccggcggtttggatcgtcatgtgaagatctacgatgtgagcacctacaaaactgtgcacactctgacctatccaaatgctgttgttagcctgggcgttgctgccaaggatcaggctgtggttgccggcatggtcgatggccttgtctccattaagcgtatgattgttgaaagcaaaccgagtcacctgaaaaagatcagggtcagttaccggaaacaacgtttgcagaagatggcacgtccggcgacgggtgttccagtcgatcatgtggtatccgacaaaagcaaaggtaacaaactgcagaagttcgatatccatctgcgcaaatataactacaagaaggccctcgactgtgtctgcacaccgttaaatgttaagaaacacccggagatggttgtggccgtcattacggagctgcaacatcgcggtgcgctacaagccgcattaaccgatcgcaaagatataactataatccgattcatcaacttcctttgcaaacatctcggcgaggtgcgctttatgcgtccgctgctgaatgcagccagcgctgtgatggatgtgtttgagaacaatgcctttgcctacaacaaacccatgatagccgccttagagcgactcaaacggaccatgaaatcggaggtggagctcacctgccagctgctccaaatcaaaggtgctctcgagatgatcattggcggcgcccttgacaacaacgagtccagcactaatcacagctacacccagccaattccgaccaaaatgcatccctcaaaagcagcctccagctacatagtcattgtcgactga

SEQ ID NO: 11217 - protein, 534 aa, Drosophila mojavensis
MTSFQPLNIRRFQQKAQVVTPDTIYWDRLAKPELLKEHTTIDYIDFSPSEPSNFVLTCSVRVQIYNLVTKLVVKNLSRFQKTAYGANFRQDGRLLAAGDEEGHVKIFDTTSRNILRLFKGHKAPVHRAFFTADKLQLASFADDKSVRLWDVANEKVVQTYEDAHTDYIRAGAMHPQSSHMFISGGYDGKINLYDTRAEKAITHTLDHGSPVESMLFLPNGSIFITAGGTQVRVWDLISGSRLLTTMSQHHKTITCLSLGSDGRRLLSGGLDRHVKIYDVSTYKTVHTLTYPNAVVSLGVAAKDQAVVAGMVDGLVSIKRMIVESKPSHLKKIRVSYRKQRLQKMARPATGVPVDHVVSDKSKGNKLQKFDIHLRKYNYKKALDCVCTPLNVKKHPEMVVAVITELQHRGALQAALTDRKDITIIRFINFLCKHLGEVRFMRPLLNAASAVMDVFENNAFAYNKPMIAALERLKRTMKSEVELTCQLLQIKGALEMIIGGALDNNESSTNHSYTQPIPTKMHPSKAASSYIVIVD

SEQ ID NO: 11218 - DNA, 1608 bp, Drosophila sechellia
  CDS (1)..(1608)
atgcagaactcctttcttccactgaacacaaggcgttttcaacagcggtcccaggtggaaacgccggatacggtatactgggaccgactggcggaaccagaaatactcaaggagcacaacaccatcgactatttggacttcagtccaaccgatcctgacaactttgttgtgacctgttcggtgcgcgttcagatctacaacctggtgaccatgcttgtagtaaataacctttcccgattccaaaagaccgcatacggagccaccttccggcaggatggtcgactcctggccgccggcgacgaggaaggccatgtcaagctattcgacaccaccagtcgcaacatcttgcgtttgttcaagggacacacggcaccagtacaccgcaccttctttacggcggacaagctgcagctagccagttttggagacgacaagtcggtccgtctgtgggacgtggcgaacgagaaggtggtgcaaacgtacgaggacacgcacactgactacgttcgtgctggcgccatgcatccgcaggcagggcatatgttcgtctccggcggctacgatggcaagatcaatctgtacgatacgagagcggaaacggcggtgcagcgcaccttggatcacggagctcctgtggagtccatgttgttccttccgaacggttctattttcgtcagcgccggcggcagccaggtgcgtgtatgggatctaatcagcggctgccgtctgctcaccatgatgtcgcagcatcacaaaacagtaacttgtctgcgactgggatccgatggcaggagattgctctcaggcgggctcgataggcacgtgaaaatctacgatgtgagcacctacaaaacagtgaaaacgttgacctatcccaatgcagtggtcagcatggccgtcgctaacggggatcaggcagttgtggctgggatggtcgatggcctagtctccattcgtcgcatgatggtagacagcaagcccagtcatttaaaaaagattcgagcggatagcgctcgaaagtacttcaggagtaaaaaacgcacgaacaacacccaagaggttgatcacacgatcaaggaccgcgtcaagggacccggattgaaatactacgatgtgcacttgcgcatgtttaaccacaagaaggctttggacgacgtgatgaatgcgcagaagatgggaaaccagccggagctcgttgtggctgtcatcacggaccttctgcaccgtggatcactgggaaaagccctcacgggtcgtcaagaggcagtgtatgtccgtttcatcgacttcatttgcaaccacttgggcgagtcgcgattcatgcgcccgctgatgatggccgccaggacggtcatggatgtcttcgagcagcaattggtggcctacagccagaagctgatgaaagccttgcaacgattgtcacttgctatgcaggaggaggtgaggctcaccgccgagcttatgcggatgaagggtgctgtggatatgctcattgggatttcaatggacaatagcgaggtagtccataagcctacctatgtggaggcaaagacacctatgatgcatccctccgaggcggcgcaaaattacgtggtcttagtggagtga

SEQ ID NO: 11219 - protein, 535 aa, Drosophila sechellia
MQNSFLPLNTRRFQQRSQVETPDTVYWDRLAEPEILKEHNTIDYLDFSPTDPDNFVVTCSVRVQIYNLVTMLVVNNLSRFQKTAYGATFRQDGRLLAAGDEEGHVKLFDTTSRNILRLFKGHTAPVHRTFFTADKLQLASFGDDKSVRLWDVANEKVVQTYEDTHTDYVRAGAMHPQAGHMFVSGGYDGKINLYDTRAETAVQRTLDHGAPVESMLFLPNGSIFVSAGGSQVRVWDLISGCRLLTMMSQHHKTVTCLRLGSDGRRLLSGGLDRHVKIYDVSTYKTVKTLTYPNAVVSMAVANGDQAVVAGMVDGLVSIRRMMVDSKPSHLKKIRADSARKYFRSKKRTNNTQEVDHTIKDRVKGPGLKYYDVHLRMFNHKKALDDVMNAQKMGNQPELVVAVITDLLHRGSLGKALTGRQEAVYVRFIDFICNHLGESRFMRPLMMAARTVMDVFEQQLVAYSQKLMKALQRLSLAMQEEVRLTAELMRMKGAVDMLIGISMDNSEVVHKPTYVEAKTPMMHPSEAAQNYVVLVE

SEQ ID NO: 11220 - DNA, 1608 bp, Drosophila sechellia
  CDS (1)..(1608)
atgcagaactcctttcttccactgaacacaaggcgttttcaacagcgggcccaggtggaaacgccggatacggtgacctgggaccgactggcggaaccagaaatactcaaggagcacaacaccatcgattatttggacttcagtccaaccgatcctgacaactttgttgtgacctgttcggtgcgcgttcagatctacaacctggtgaccatgcttgtggtaaataacctttcccgattccaaaagaccgcatacggagccaccttccggcaggatggtcgactcctggccgccggcgacgaggaaggccatgtcaagctattcgacaccaccagtcgcaacatcttgcgtttgttcaagggacacacggcaccagtacaccgcaccttctttacggcggataagctgcatctagccagttttggagacgacaagtcggtccgtctgtgggacgtggcgaacgagaaggtggtgcaaacgtacgaggacacgcacaccgactacgttcgtgctggcgccatgcatccgcaggcagggcatatgttcgtctccggcggctacgatggcaagatcaatctgtacgatacgagagcggaaacggcggtgcagcgcaccttggatcacggagctcctgtggagtccatgttgttccttccgaacggttctattttcgtcagcgccggcggcaggcaggtgcgcgtatgggatctaatcagtggctgccgtctgctcaccatgatgtcgcagcatcacaaaacagtaacttgtctgcgactgggatccgatatcaggagattgctctcaggcgggctcgataggcacgtgaaaatctacgatgtgagcacctacaaaacagtgaaaacgttgacctatcccaatgcagtggtcagcatggccgtcgctaacggggatcaggcagttgtggctgggatggtcgatggcctagtctccattcgtcgcatgatggtagacagcaagcccagtgatttaaaaaagattcgtgcggatagcgctcgaaagtacttcacgagtaaaaaacgcacgaacaacacccaagaggttgatcacacgatcaaggaccgcgtcaagggacccggattgaaatactacgatgtgcaattgcgcatgtttaaccacaagaaggctttggacgacgtgatgaatgcgcagaagatgggaaaccagccggagctcgttgtggctgtcatcacggaccttctgcaccgtggatcactgggaaaagccctcacgggtcgtcaagaggcagtgtatgtccgtttcatcgacttcatttgcaaccacttgggcgagacgcgattcattcgcccgctgatgatggccgccaggacggtcatggatgtcttcgagcagcgattggtggcctacagccagaagctgatgaaagccttgcaacgattgtcactagcaatgcaggaggaggtgaggctcaccgccgagctgatgcggatgaagggtgctgtgaatatgctcattgggatttcaatggacaatagcgaggtagtccataagcccacctatgtggaggcaaagacacctatgatgcatccctccgaggcggcgcaaaattacgtggtcttagtggagtga

SEQ ID NO: 11221 - protein, 535 aa, Drosophila sechellia
MQNSFLPLNTRRFQQRAQVETPDTVTWDRLAEPEILKEHNTIDYLDFSPTDPDNFVVTCSVRVQIYNLVTMLVVNNLSRFQKTAYGATFRQDGRLLAAGDEEGHVKLFDTTSRNILRLFKGHTAPVHRTFFTADKLHLASFGDDKSVRLWDVANEKVVQTYEDTHTDYVRAGAMHPQAGHMFVSGGYDGKINLYDTRAETAVQRTLDHGAPVESMLFLPNGSIFVSAGGRQVRVWDLISGCRLLTMMSQHHKTVTCLRLGSDIRRLLSGGLDRHVKIYDVSTYKTVKTLTYPNAVVSMAVANGDQAVVAGMVDGLVSIRRMMVDSKPSDLKKIRADSARKYFTSKKRTNNTQEVDHTIKDRVKGPGLKYYDVQLRMFNHKKALDDVMNAQKMGNQPELVVAVITDLLHRGSLGKALTGRQEAVYVRFIDFICNHLGETRFIRPLMMAARTVMDVFEQRLVAYSQKLMKALQRLSLAMQEEVRLTAELMRMKGAVNMLIGISMDNSEVVHKPTYVEAKTPMMHPSEAAQNYVVLVE

SEQ ID NO: 11222 - DNA, 1611 bp, Drosophila virilis
  CDS (1)..(1611)
atgactaatttccagccactaaatgtgcgacggtttcagcaaaaggcccaagtagtcacacccgacaccatatattggaatcgcttggcgaaaccggagctgctcaaggaacacacaacgatcgactatatagacttcagtccaagtgatccagacaattttgtgctgacatgttcggtgcgtgtgcaaatctacaatctggtgacaaagctggtggttaagaatttgtcacgcttccaaaagaccgcgtacggtgccacatttaggcaggacggtcgccttttggccgccggcgacgaggagggtcatgtgaagcttttcgatacaactagccgaagcatattgcgtctgttcaagggccacaaggcgcccgtgcatcgcaccttctttacggccgacaaactgcatttggccagctttgcggacgacaaatccgtccgtctctgggatgtggcgaacgagaaggtggtgcaaacatatgaggatgcgcacagcgactatatacgagccggtgccatgcatccgcaggcgaagcacatgttcatctccggcggctatgatggtaaaatcaatctctatgacacgcgcgccgaacaggcaataacacaaaccttggatcatggcagtcccgttgagtcgatgctgttcctgccgagcggttcaatattcatcacagccggcggcacacaggtgcggcgtctggggattttaatcagtggctgtcgcttgctaacgaccatgtcacagcaccacaagacgataacgtgtctgcgtctgggctccgacggcaggcgtctgctctccggcggtctggatcgtcatgtcaagatctatgatgttagcacatataaaacggtgcacacacttacctatccaaatgcggtggtcagcctggccgttgctgccaaggatcaggctgttgttgccggcatggtcgatggcttggtctccatcaaacggatgattgtcgacagcaaaccgagccatctgaagcaaatcaaggccagccatcggcagaagcatttcaagagattggcgcgtccaaatactggccaaccggttgatcatgtaattaccgtcaaaagaagcgcaaccaagctcaaaccgtacgatatacatctgcgcaaattcaactataagcaggcgcttgactttgtctgtacacgccggaacattgagaagtttccggaaaacgttgtcgccgtcatcacagagctgcagcatcgcagcgcactgcaggcggcgctcacaaatcgacccgacgagaagatcatacagtttattaactttctgtgcgatcatatgggtgaggtgcgatttatgcgtccgctcctgaatgccgccagcgccgtaatggatgtgttcgagaacaatgtatttagctacaacaaacagatgctgtctgccctggagcggctcaggcggacaatgcaggccgagattcgtctgacctgtgaactgttgcaggtgaagggcgctctcgagatgatcattggcggtgcgctggacaacaacgaggagacggcgcccacactacgctacacacataacaaaacgcccaaaatgcatccctcaaaggcggcctccaactatgtggtcattgtcgactga

SEQ ID NO: 11223 - protein, 536 aa, Drosophila virilis
MTNFQPLNVRRFQQKAQVVTPDTIYWNRLAKPELLKEHTTIDYIDFSPSDPDNFVLTCSVRVQIYNLVTKLVVKNLSRFQKTAYGATFRQDGRLLAAGDEEGHVKLFDTTSRSILRLFKGHKAPVHRTFFTADKLHLASFADDKSVRLWDVANEKVVQTYEDAHSDYIRAGAMHPQAKHMFISGGYDGKINLYDTRAEQAITQTLDHGSPVESMLFLPSGSIFITAGGTQVRRLGILISGCRLLTTMSQHHKTITCLRLGSDGRRLLSGGLDRHVKIYDVSTYKTVHTLTYPNAVVSLAVAAKDQAVVAGMVDGLVSIKRMIVDSKPSHLKQIKASHRQKHFKRLARPNTGQPVDHVITVKRSATKLKPYDIHLRKFNYKQALDFVCTRRNIEKFPENVVAVITELQHRSALQAALTNRPDEKIIQFINFLCDHMGEVRFMRPLLNAASAVMDVFENNVFSYNKQMLSALERLRRTMQAEIRLTCELLQVKGALEMIIGGALDNNEETAPTLRYTHNKTPKMHPSKAASNYVVIVD

SEQ ID NO: 11224 - DNA, 1623 bp, Drosophila willistoni
  CDS (1)..(1623)
atgaagggtaatttccagccattaaatgtgagacgtttccaacaaaaggcccaggtggagacgcctgacaccatttattgggaccgactggcgaaaccggaacttctcaaagaacacagtaccattgactatgttgacttcagtcccagcgatccggataacttcgtactgacctgctctgttcgcgtacagatctataatctggtcactaagctggtagtaaagaatctttcgcgattccaaaagactgcattcggtgccacattccggcaggacggacgtttgctggccgccggtgatgaagagggtcatgtcaagctctttgacaccaccagccggaacattttacgtttattcaagggccacaaagcaccagtgcatcgaacctactttacggcggacaaactgcagttggcgagcttttccgatgacaaaacggtgcgtctgtgggatgtggccaacgaaaaggtggtgcaaacatatgaagatgcccacacggactacatacgagcaggctccatgcatccccaatcctctcatatgtttgtgtccggtggctacgatggcaaaattcatttatacgacacacgctccgaaacggccgttcaacgtaccctagatcatggcagtccggtggagtccatgttgttcctgcccagcggctccatattcattagtgccggcggcactcaagtccgcgtctgggatttaatcagcggttgccggttgcttacgatgatgtcgcagcatcacaagacagttacctgtcttcgcttgggctccgatggcagacgtctcttctccggtggcttggaccggcatgtgaaaatctatgatgtgagcacttacaaaaccgtccacacccttacgtatcccaatgctgtagtcagtctgggtgtggcgcccaaagatcaggcagtggttgccggcatggtggatggactcgtgtcgatacgtcgcatgattgtcgacagcaaaccaagtcacttgaggaaaatccgcttgacccacaagcaacgccagaagaaaatggaactcgacaggcttaaagtgcccgctcacatagctaagaaagccgatcacattgtcacggagcggaaactgcaaaagtatcagcccttcgatgtccatttgcgtaaattcaattacaaaaaggccttggacgcggccatggtgccagtaaatataagccaaaatcccgaaatagttgtagccctcataacagagttactgcatcgacggggcctggacattgcgctaaccgatcgctccgatgcggtgctaatccaattcatcgactttctctgcaaccatctgggtgagacgcgctttatgcggcccctgatgaatgccgccagcaccgttctggacgtatttgaacgcaaaatggtggcttatagccgccatctaatggaggcactggaaagactggctgcggcgatgcatgcagagattcagctaaccaccgaacttcttcagataaagggcgccatggaaatgctaattggtgcctctctcgagagcgtcgagtcgagaacgccaaaggtgaatcatcaagagtcgcgaacgtcgcgaatgcaaccatctaaggaggccgagaaatatgtcgtattcgtggagtga

SEQ ID NO: 11225 - protein, 540 aa, Drosophila willistoni
MKGNFQPLNVRRFQQKAQVETPDTIYWDRLAKPELLKEHSTIDYVDFSPSDPDNFVLTCSVRVQIYNLVTKLVVKNLSRFQKTAFGATFRQDGRLLAAGDEEGHVKLFDTTSRNILRLFKGHKAPVHRTYFTADKLQLASFSDDKTVRLWDVANEKVVQTYEDAHTDYIRAGSMHPQSSHMFVSGGYDGKIHLYDTRSETAVQRTLDHGSPVESMLFLPSGSIFISAGGTQVRVWDLISGCRLLTMMSQHHKTVTCLRLGSDGRRLFSGGLDRHVKIYDVSTYKTVHTLTYPNAVVSLGVAPKDQAVVAGMVDGLVSIRRMIVDSKPSHLRKIRLTHKQRQKKMELDRLKVPAHIAKKADHIVTERKLQKYQPFDVHLRKFNYKKALDAAMVPVNISQNPEIVVALITELLHRRGLDIALTDRSDAVLIQFIDFLCNHLGETRFMRPLMNAASTVLDVFERKMVAYSRHLMEALERLAAAMHAEIQLTTELLQIKGAMEMLIGASLESVESRTPKVNHQESRTSRMQPSKEAEKYVVFVE

SEQ ID NO: 11226 - DNA, 1608 bp, Drosophila yakuba
  CDS (1)..(1608)
atgcagaacaccttcatcccattgaacatacggcgtttccaacagcgggctcaggtggaaacgccggatacggtgtactgggaccgtctggcgaaaccggaactcctcaaggagcataacaccatcgattatttggacttcagccccagcgatcccgacaactttgtggtgacctgttcggtgcgcgtgcagatctacaacctggtgaccaagctcgtggtgaagaacctttcccgattccaaaagaccgcatacggagccaccttccggcaggatggtcgtctcctggccgccggcgacgaggagggtcacgttaagctatttgacaccaccagccgcaacatcttgcgtttgttcaagggacacacggcgccggtgcatcgcaccttctttacagcggacaagctgcagctagccagttttggagatgataggtcggtccgtctgtgggacgtggccaacgagaaggtggtacaaacctacgaggacacgcacaccgactatattcgtgccggcgctatgcatccgcaggcagggcacatgttcgtctccggtggctacgatggcaaaatcaatctgtacgatacgcgagccgaaaaggcggtgcagcacaccttggatcatggagctccggtggagtcgatgttgttccttcccaacggttccatattcgtcagcgccggtggcagccaggttcgcgtatgggatctcatcagcggctgccgtctgctcaccatgatgtcacagcatcacaaaaccgtaacttgcctgcgactgggctccgatggcaagagattgctctcaggcgggctcgatcggcacgtgaaaatctacgatgttagcacctacaagacagtgcacacgttgacctatcccaatgccgtggtcagcatggctgtcgctggcaaagatcaggcagttgtggctggaatggtcgatggtctggtctccattcgtcgcatgattgtagacagcaagcctagtcatttgaaaaagattcgtgcggagcggacacgcgggcacttcaaagatttgacacgcccgaccccccaccaggaggttgatcacaccatcaaggatcgagtcaattggtccggcttgaaaacctacgataagcagttgcgcgcttttaaccacaagagggctttggacaacgcgatgaatacgcagaggatggcaaatcatccggaggtccttgtggccgtcattacggaccttctgcaccgtaagtctctggacaaagccctcactgatcgtcgcgacgccacgcttgttcgattcatcgactttatctgcaaacatgtgagtgagacgcgattcatgcgcccgttgatgatggccgccagcacggtcttggaggttttcgagcggcgattggtggcctacagcccgaagctgatgcgtgcattggaacgattgtcaagtgctatgcaggaggaagtgagacttactaccgagctgatgcggctaaagggcgccatggacatgcttattggggtttcaatggacaatggcgaggtggcccataagcccacatatgtggagactaagacaccgaggatgcagccctctcaggcggcggaaaagtacgtggtctttgtggagtga

SEQ ID NO: 11227 - protein, 535 aa, Drosophila yakuba
MQNTFIPLNIRRFQQRAQVETPDTVYWDRLAKPELLKEHNTIDYLDFSPSDPDNFVVTCSVRVQIYNLVTKLVVKNLSRFQKTAYGATFRQDGRLLAAGDEEGHVKLFDTTSRNILRLFKGHTAPVHRTFFTADKLQLASFGDDRSVRLWDVANEKVVQTYEDTHTDYIRAGAMHPQAGHMFVSGGYDGKINLYDTRAEKAVQHTLDHGAPVESMLFLPNGSIFVSAGGSQVRVWDLISGCRLLTMMSQHHKTVTCLRLGSDGKRLLSGGLDRHVKIYDVSTYKTVHTLTYPNAVVSMAVAGKDQAVVAGMVDGLVSIRRMIVDSKPSHLKKIRAERTRGHFKDLTRPTPHQEVDHTIKDRVNWSGLKTYDKQLRAFNHKRALDNAMNTQRMANHPEVLVAVITDLLHRKSLDKALTDRRDATLVRFIDFICKHVSETRFMRPLMMAASTVLEVFERRLVAYSPKLMRALERLSSAMQEEVRLTTELMRLKGAMDMLIGVSMDNGEVAHKPTYVETKTPRMQPSQAAEKYVVFVE

SEQ ID NO: 11228 - DNA, 1608 bp, Drosophila simulans
  CDS (1)..(1608)
atgcagaactcctttcttccactgaacacaaggcgttttcaacagcggtcccaggtggaaacgccggatacggtgtactgggaccgactggcggaaccagaaatactcaaggagcacaacaccatcgattatttggacttcagtccaaccgatcctgacaactttgttgtgacctgttcggtgcgcgttcagatctacaacctggtgaccatgcttgtggtaaataacctttcccgattccaaaagaccgcatacggagccaacttccggcaggatggtcgactcctggccgccggcgacgaggaaggccatgtcaagctattcgacaccacgagtcgcaacatcttgcgtttgttcaagggacacacggcaccagtacaccgcaccttctttacggcggacaagctgcagctagccagttttggagacgacaagtcggtccgtctctgggacgtggcgaacgagaaggtggtgcaaacgtacgaggacacgcacaccgactacgttcgtgctggcgccatgcatccgcaggcagggcatatgttcgtctccggcggctacgatggcaagatcaatctgtacgatacgagagcggaaacggcggtgcagcgcaccttggatcacggagctcctgtggagtccatgttgttccttccgaacggttctatattcgtcagcgccggcggcagccaggtgcgcgtatgggatctaatcagcggctgccgtctgctcaccatgatgtcgcagcatcacaaaacagtaacttgtctgcgactgggatccgatggcaggagattgctctcaggcgggctcgataggcacgtgaaaatctacgatgtgagcacctacaaaacagtgaaaacgttgacctatcccaatgcagtggtcagcttggccgtcgctaacggggatcaggcagttgtggctgggatggtcgatggcctagtctccattcgtcgcatgatggtagacagcaagcccagtcatttaaaaaagattcgtgcggatagcgctcgaaagtacttcacgagtaaaaaacgcacgaacaacacccaagaggttgatcacacgatcaaggaccgcgtcaagggacccggattgaaatactacgatgtgcacttgcgcatgtttaaccacaagaaagctttggacgacgtgatgaatgcgcagaagatgggaaaccagccggagctcgttgtggctgtcatcacggaccttctgcaccgtggatcactgggaaaagccctcacgggtcgtcaagaggcagtgtatgtccgtttcatcgacttcatttgcaaccacttgggcgagacgcgattcatgcgcccgctgatgatggccgccaggacggtcatggatgtcttcgaggagcaattggtggcctacagccagaagctgatgaaagccttgcaacgattgtcacttgcaatgcaggaggaggtgaggctcaccgccgagctgatgcggatgaagggtgctgtggatatgctcattgggatttcaatggacaatagcgaggtagtccataagcccacctatgtggaggcaaagacacctatgatgcatccctccgaggcggcgcaaaattacgtggtcttagtggagtga

SEQ ID NO: 11229 - protein, 535 aa, Drosophila simulans
MQNSFLPLNTRRFQQRSQVETPDTVYWDRLAEPEILKEHNTIDYLDFSPTDPDNFVVTCSVRVQIYNLVTMLVVNNLSRFQKTAYGANFRQDGRLLAAGDEEGHVKLFDTTSRNILRLFKGHTAPVHRTFFTADKLQLASFGDDKSVRLWDVANEKVVQTYEDTHTDYVRAGAMHPQAGHMFVSGGYDGKINLYDTRAETAVQRTLDHGAPVESMLFLPNGSIFVSAGGSQVRVWDLISGCRLLTMMSQHHKTVTCLRLGSDGRRLLSGGLDRHVKIYDVSTYKTVKTLTYPNAVVSLAVANGDQAVVAGMVDGLVSIRRMMVDSKPSHLKKIRADSARKYFTSKKRTNNTQEVDHTIKDRVKGPGLKYYDVHLRMFNHKKALDDVMNAQKMGNQPELVVAVITDLLHRGSLGKALTGRQEAVYVRFIDFICNHLGETRFMRPLMMAARTVMDVFEEQLVAYSQKLMKALQRLSLAMQEEVRLTAELMRMKGAVDMLIGISMDNSEVVHKPTYVEAKTPMMHPSEAAQNYVVLVE

SEQ ID NO: 11230 - DNA, 1512 bp, Drosophila simulans
  CDS (1)..(1512)
atgcagaactacaaacttccactgaacaagcggcgtcttcaacagcgagcccaggtggaaacgccggattcggtgtactggggccgactggcgaaaccagaactactcaaggagcacaacgccatcgattatttggacttcagtcccagcgatcctgacaactttgctgtgacctgttcggagcgcgttcagatctacaatctggtgacaaagcttttggtaaggaacctgtcccgattcaaaaagaccgcatacggagccaccttccggcaggatggtcaattcctggccgccggcgacgaggaaggccacgtcaagctattcgacagcactcgcaacatcatgcgtttgttcaaggggcacacggcaccagtacaccgcaccttctttacggcggacaagctgcagctagccagttttggagacgacaaggtggttcgtctgcgggacttggcgaacggcaaggtggtgcaaacgtacaaggacacgcacaccgactacgttcgtgctggcgccatgcatccgcaggcggggcatgtcttcgtctccggcggctacgatggcaagatcaatctgtacgatacgagagcgaaaaaggcggtgcagcgcaccgtggatcacggagcgcctgtggagtccatgttgttccttccgaacggttccattttcgtcagcgccggcggcaaccaggtgcgcttatgggatctcatcaacggctgccgtctgttcaccatgatgtcgcagcatcacaaaacaataacttgtctgcgactgggatccgatggcaggagattgctctctggcgggctcgatgggaaggtgaaaatctacgatatgagcacctacagaacagtgcacacgttgacctatcccaatgcggtgcgcagcctggctgtcgctgacggcgataaggcagttgtggctgggatggtcgatggccaagtctccattcgtcgcatgacggcagacagcaagcccagtgatttggaaaagattcgtgaggatctcgctcgaaataacttcacgagtagaaaacccacgaacaacacccaagagggtgatcccataatcaaggaccgcgtccaggagcccaaattgatatcctacgatgtgcacttcctcccgtttaactgcaaggaggctttggacgaggtgatgcatgcgcagaagatggaaaaccagccggagctcgttgtggctgtcatcacggacctactgcaccgtggatcactggaaaaagccctcacgggtcgtcgtgaggcagagcttgtccgattcatcgacttcatttgcaaccacttgggcgagatgcgattcgtgcgcccgctgttgatggccgccagcaggatcttggatgtcttagagcagcacttggtgggctacagcgataagctgatggaagccttgcaacgattgtcacttgcaatgcaggaggaggtgaggcttaccgccgacctgatgcgtttgaagggtgctctgcatatgcatatgcatgcattgcaaatcagatag

SEQ ID NO: 11231 - protein, 503 aa, Drosophila simulans
MQNYKLPLNKRRLQQRAQVETPDSVYWGRLAKPELLKEHNAIDYLDFSPSDPDNFAVTCSERVQIYNLVTKLLVRNLSRFKKTAYGATFRQDGQFLAAGDEEGHVKLFDSTRNIMRLFKGHTAPVHRTFFTADKLQLASFGDDKVVRLRDLANGKVVQTYKDTHTDYVRAGAMHPQAGHVFVSGGYDGKINLYDTRAKKAVQRTVDHGAPVESMLFLPNGSIFVSAGGNQVRLWDLINGCRLFTMMSQHHKTITCLRLGSDGRRLLSGGLDGKVKIYDMSTYRTVHTLTYPNAVRSLAVADGDKAVVAGMVDGQVSIRRMTADSKPSDLEKIREDLARNNFTSRKPTNNTQEGDPIIKDRVQEPKLISYDVHFLPFNCKEALDEVMHAQKMENQPELVVAVITDLLHRGSLEKALTGRREAELVRFIDFICNHLGEMRFVRPLLMAASRILDVLEQHLVGYSDKLMEALQRLSLAMQEEVRLTADLMRLKGALHMHMHALQIR

SEQ ID NO: 11232 - DNA, 1521 bp, Trichoplax adhaerens
  CDS (1)..(1521)
atggcggactttaaaaggattcctattaaaaaattctctaaagccaatgttgaagaaagcagtgaatcaagctattggatgggatataagttccctatagtggccaaagaacattcagcaatatcatgtatcgatttttcacctgtcctaccgcatcactacgctgttacttgttccgcaaaggtgcaattgtacgattgtgcaagtaatcaagtttacaaagccatttcgaggtttcatgactctgccttatgcggtacatttcgttacgatggcaagttaattacagctggaagcggcgatggtttagtccaggtatttgatacgcatagtagaacagtattacgacaattacatggtcataagagagctgctcatgtagcccgtttcgcaatgaacaatctacacattatttcggcctcagatgacaaattagttcgttgctgggatttacccactggaaaagaagttgctatttttgatgaacatacggattacatccgagctggagatgtcagtagagttagcagcgatgtttgggtaacaggatcgtatgaccataccttaaagctatgggacaggcgtacagacaagagttcgatgactatagatcatggagctcctgtagaagcagtgttaatttaccctagtggaagtatttgtatctcggcaggaagtaattatatcaaggtatgggaccttattggtggtggacgcctactgatgggtgttacaaatcatcaaaagactattacatgcttgtgtttagataacagtgggcaaagacttttatccgggtcgttagatagacacgtcaagatatatgatatcaaagattacaaagttgtccacagtatggattattcctcacccataacaagtttaggcatatcgcccgatgatagccatttagtagttggtatgtccgacggactattatctatcaaggaaagaccacgacataaacaagaattgccaaagtttaaatggagaccaaagggtcgaacagttcgttactttaatagtagaaaatcaggcccctcaaaggatgcagttattgtggcggaaaagaaattaacccggttgcctttacatgacaaactattgcgtcagtttaagtatactgaggctttggatagcgttttaaagaaatctagcaatcacccgcctgttattgtcagtgtaatacaagaactaataaggcgcgatggcttacctatagctttatctgggagagatgaagatgcattattacctgtattatattttataaaaaagaatatatctaatccgcgctatagttccctagtttctgatgttgctaatattgtatttgatatatactcaccgattttaggccaatcctcgaaagtagataatctgtttctacagatcaaagataaaattcatgaagaaacaaggcttcatgaatcgtttggaaagttattaggggttattgatatgatgctaacagcaaataatacgtcagctaattctatatcggctgccccattgacgtag

SEQ ID NO: 11233 - protein, 506 aa, Trichoplax adhaerens
MADFKRIPIKKFSKANVEESSESSYWMGYKFPIVAKEHSAISCIDFSPVLPHHYAVTCSAKVQLYDCASNQVYKAISRFHDSALCGTFRYDGKLITAGSGDGLVQVFDTHSRTVLRQLHGHKRAAHVARFAMNNLHIISASDDKLVRCWDLPTGKEVAIFDEHTDYIRAGDVSRVSSDVWVTGSYDHTLKLWDRRTDKSSMTIDHGAPVEAVLIYPSGSICISAGSNYIKVWDLIGGGRLLMGVTNHQKTITCLCLDNSGQRLLSGSLDRHVKIYDIKDYKVVHSMDYSSPITSLGISPDDSHLVVGMSDGLLSIKERPRHKQELPKFKWRPKGRTVRYFNSRKSGPSKDAVIVAEKKLTRLPLHDKLLRQFKYTEALDSVLKKSSNHPPVIVSVIQELIRRDGLPIALSGRDEDALLPVLYFIKKNISNPRYSSLVSDVANIVFDIYSPILGQSSKVDNLFLQIKDKIHEETRLHESFGKLLGVIDMMLTANNTSANSISAAPLT

SEQ ID NO: 11234 - DNA, 1512 bp, Ciona intestinalis
  CDS (1)..(1512)
atgaattcaagtcgatataaaagcacggaagcagtgccgattgcaactgcagcaagaaaacatacccaagactacaattattggagaagcctgcagtttccgataatagtaaaggaatacggggctgttacgaatgttgaatttcagcctacggagccacatcactttgctgttacagcatcaagtcgcgttgagttgtacagtaaggaaagcaatgaagttgtaaaaacattttctcgctttcataacacagcttatggcgcgagttttagatcggacgggaaactcttagttgccgggaacgaggacactcaagttcgcctgtttgacgtccaaggaagagttcccctgcgtatttttaaaggccattctcgtcctgtgcatgtaacaaagttctgtaacaacaagcagcaattattttcggcttctgatgacaaaactgtcagggtctgggacatttctactgagcagacattaaatgagttttgtggtcacgaggactatgttaggtgcggctgcatcagtacggcttcagaaaatacgattgttacaggtgcatacgatcacactgtgcgtatgtttgacactcgtagcaatgcaaatacaatcactattaaccatggatgtcctgtagaaagtgtattgctcttcccatctggaagcattatattaagtgctggtggtcactctataaaggtatgggatgctttacaaggaggcaagcttcttaccactgtcagcaaccatcacaaaacaataacatgcatgacatttaaccacgattgtactcgcttactctctggaagtttagacagacatgtgaaaatatatgatgttacaaattacaaagtggtgcacaacatagactatgctggttctatcttgagcatggcagtttctcccaatgatgagaccttggttgtgggaatggctgacaaaatgttatctatccgtcatagaaaacaatgcaataaagaagaaatgaaagaagaaaaccttcatctgagcaagagaaagcaaaagtcgatgatgagaggtcgcaattttgttccgaacaaagatgatattgttgttcaacatcaccagaagcaacacttagcaaaatacgaccaatactttcggaaatttgagcacagcaaagcactggatgctgctttggttgcccatgtatccaccaacagccctgaaataactgttgcagtgctgcaagagcttattcgtcgtgatacaattcgtgcctcattaagtggtagaaccggcaataaacttgttgttctgcttaaatttctttgcagaaatatttctaatgttagctttgctccaactcttttaaaagtatgtgagttgcttcttgatagttgccttgaaacgattgaaaatgtcccagttgaagtcagtcacttattcaaaaggcttcaaaatatcatgcattcagagtcactacttcaagtggagatgactaaactacttggcagtatggaccttattttaagttccagcattaaaaactga

SEQ ID NO: 11235 - protein, 503 aa, Ciona intestinalis
MNSSRYKSTEAVPIATAARKHTQDYNYWRSLQFPIIVKEYGAVTNVEFQPTEPHHFAVTASSRVELYSKESNEVVKTFSRFHNTAYGASFRSDGKLLVAGNEDTQVRLFDVQGRVPLRIFKGHSRPVHVTKFCNNKQQLFSASDDKTVRVWDISTEQTLNEFCGHEDYVRCGCISTASENTIVTGAYDHTVRMFDTRSNANTITINHGCPVESVLLFPSGSIILSAGGHSIKVWDALQGGKLLTTVSNHHKTITCMTFNHDCTRLLSGSLDRHVKIYDVTNYKVVHNIDYAGSILSMAVSPNDETLVVGMADKMLSIRHRKQCNKEEMKEENLHLSKRKQKSMMRGRNFVPNKDDIVVQHHQKQHLAKYDQYFRKFEHSKALDAALVAHVSTNSPEITVAVLQELIRRDTIRASLSGRTGNKLVVLLKFLCRNISNVSFAPTLLKVCELLLDSCLETIENVPVEVSHLFKRLQNIMHSESLLQVEMTKLLGSMDLILSSSIKN

SEQ ID NO: 11236 - DNA, 1599 bp, Hydra magnipapillata
  CDS (1)..(1599)
atggctacagattttcaaaagcttccaagaaaacaatttcctaaaacagaacttagaacagattcaaaagaaaataaacaatggaaattatttcagtttcctgttattgttaaagaatattcagccatcaattgtgttcatttttctcctgttgaaccttataactgcctggtgacaagttctgccaaggtacaaattttcgctccatatacaaatgaaattatacgaacttcttctcgatcaaaagaaaatgtttatggcgctcggtttagattagatggaaagttaatggtcactggaggagagagtggtactgtacaggtattagatgttaacagtagagctattctcagaaatttaaaaggtcatacaaaacccactcatgtgtgtcattttggtcgagaacatatgaaggtattttctgcttctgatgataaaactgttcgctgttgggatcttcccactgagaaagaaacttttgttgtaaaagcccataaggattatataagatctggatgtataaacccaacaagctcagatatattcattagtgggtcctatgatcacaaaattaaaatgtgggatttacgttcaccttcagtagctatggagatgaatcatggtgctccaattgagtgtgtaatatttcatcaaaatggaagtctgtgcatatcctcaggtgggaattatataaacgtttgggacataatcgctggtggaaaactttatcaccagttctcaaaccatcaaaaaacaataacttcactctgtttcaatggggattacactcgcctattatctggatctctagacaggcatgtaaaagtatatgatatagaagattattctttggtagcaaatattgattacccatctccaatactagccatggacatttcggctgatagtcagcatatagtagtgggtatgtcagatggtgcaatttctctacgtcacaaaaagaaaactttaataaatgaaaaagttaacaggaagcggtcgtataaagttctgccgggaacttatttgcaccgaatcagaaatcgatcggcaaagccaaataagcatgatgtcattattcgtgacacttttactaaaaaactttcaaaagctgatcgtcatttacaaaaatttcgttatcatgaagcactcgattgtgtgttagtcactggctgtgataatacagaatatgtcatcagcgtgcttactgaattatcaaggagaaatgcattaaaagtagcccttaaaaatagagacgccaactcattgctcagcataatgaaatttttagttagaaatatatcttgtccattttacgcaaaaatattggtaccaattgcagatcttgttttaacaatgtactcgtcaatcgctggtacaaacaaaaagtttgatcttatgttaaaaaagttaagcgcacgcattaaagccgacctacggacatatgaagaaatgatgaaattgcttggagctatggagcaagtatttacaatgattacacctcatactgttaatacacctcatactacgattatgccaaatgctaatgaagtcgcttcagatcaaaatgtaactgatgttgattttgtaattgaatga

SEQ ID NO: 11237 - protein, 532 aa, Hydra magnipapillata
MATDFQKLPRKQFPKTELRTDSKENKQWKLFQFPVIVKEYSAINCVHFSPVEPYNCLVTSSAKVQIFAPYTNEIIRTSSRSKENVYGARFRLDGKLMVTGGESGTVQVLDVNSRAILRNLKGHTKPTHVCHFGREHMKVFSASDDKTVRCWDLPTEKETFVVKAHKDYIRSGCINPTSSDIFISGSYDHKIKMWDLRSPSVAMEMNHGAPIECVIFHQNGSLCISSGGNYINVWDIIAGGKLYHQFSNHQKTITSLCFNGDYTRLLSGSLDRHVKVYDIEDYSLVANIDYPSPILAMDISADSQHIVVGMSDGAISLRHKKKTLINEKVNRKRSYKVLPGTYLHRIRNRSAKPNKHDVIIRDTFTKKLSKADRHLQKFRYHEALDCVLVTGCDNTEYVISVLTELSRRNALKVALKNRDANSLLSIMKFLVRNISCPFYAKILVPIADLVLTMYSSIAGTNKKFDLMLKKLSARIKADLRTYEEMMKLLGAMEQVFTMITPHTVNTPHTTIMPNANEVASDQNVTDVDFVIE

SEQ ID NO: 11238 - DNA, 1494 bp, Schizosaccharomyces japonicus yFS275
  CDS (1)..(1494)
atgtccgctcctacagggagactccaaccgcaaagatttgcggctcttccctctcatttaacctctgaaaacaaattctggaactcatttaaggttccaattgttgcaaaagagtatgcagctgtaaccaatattaatttctctcaaagttcgccctacgactttgctgtgactagcggaactcgaattcaaatttatggtgccagttctcgttctgtgaaaaaaactatcgcccggtttaaggatacagtatactcgggaaatattcgaaatgatggcaagcttattgttgcaggagacgcgactggtctcattcaggttttcgatactgctacaagaagtgtattaagatcactgaactcacacaatttgcccgtccgtgtgactaagttctgtccttatgaagcaacatcgtttctgtctggttcagatgacaaaactgtccgagtttgggatctctccacgggaagaacaactgtagaactcaccggacatgaggattacgtacgctgtgcttcttggagcagtgctacgcgacttgtcagtggtagttatgatggtacagtccatctatgggatatacggtctagcaatcccaaagtgatgtcttggagccacggtgaagcagtggatgctgtgttgagtatgaagtccggcacagccgttatttctgccggtggtccgtcggtcaaagtttgggacttggttgctggtcggtcaattcccatgaagacactcatcaatcatcaaaagagtgttacatgtcttaccacaaatgcggacgaatctcgtttgcttagcggtggtttagatggtcatgtcaaaatttacaatgttgccgactggaaggtggtccatggtatcaagtactctgcacctatcttgtcacttggcctctctcctgataaccgcaatcttgttactggtatggtcaatggaacgttgtccatccgttcacgtcgcgtcgagaaaaaaccttcggagctgtcacaaagaaagcttttcttgggaggtgttggaagcgcatttggcgttcaacaacagaaaaagcctacttataagggccaaaatgatgacttctatgttgaagaagtcagaagaaagcgtcttcgtccatatgataaggccttgaaaacgttcaattatgctgatgctcttgacatggccattcaaaatggttcccctatcttaattgtcaccatgtttgtcgagctcatgaacatcgggggtttgcgtacggctttgatgaaccgcgacgatctttcgttgacaccgattcttaactttcttcgcaaatacatgcaagatcctcggtttgttaaggttctgtgtcaagtcgcctccacaattatcgacatctacggtgtcttcttgggcggcagtgtgcttgtcgagaaggcaattttgaaactaaaggagaaggttgaacgggaagcagcaattgcacagcaagcaagtgagctctcaggcatgcttcaaatgcttattgcttaa

SEQ ID NO: 11239 - protein, 497 aa, Schizosaccharomyces japonicus yFS275
MSAPTGRLQPQRFAALPSHLTSENKFWNSFKVPIVAKEYAAVTNINFSQSSPYDFAVTSGTRIQIYGASSRSVKKTIARFKDTVYSGNIRNDGKLIVAGDATGLIQVFDTATRSVLRSLNSHNLPVRVTKFCPYEATSFLSGSDDKTVRVWDLSTGRTTVELTGHEDYVRCASWSSATRLVSGSYDGTVHLWDIRSSNPKVMSWSHGEAVDAVLSMKSGTAVISAGGPSVKVWDLVAGRSIPMKTLINHQKSVTCLTTNADESRLLSGGLDGHVKIYNVADWKVVHGIKYSAPILSLGLSPDNRNLVTGMVNGTLSIRSRRVEKKPSELSQRKLFLGGVGSAFGVQQQKKPTYKGQNDDFYVEEVRRKRLRPYDKALKTFNYADALDMAIQNGSPILIVTMFVELMNIGGLRTALMNRDDLSLTPILNFLRKYMQDPRFVKVLCQVASTIIDIYGVFLGGSVLVEKAILKLKEKVEREAAIAQQASELSGMLQMLIA

SEQ ID NO: 11240 - DNA, 1518 bp, Branchiostoma floridae
  CDS (1)..(1518)
atggctgcctccttcaaacagactgcggcggtttctgcgccacgtgttggtaagaaacagacgccagacgccgcgtactggggcgacttggagttcccggtgactgttaaggagtatggcgccgtctcgtgcgtggatttctgcccggtcgagccgaactcgttcgcggtgaccgctagcgatcgggtgcagatctacaactccaggacaaacaaagtagagaaggtcctgaccagatttaaggagccggctcgcagcgggcgtttccgtggtgatggggagctgctggttgccgggggcgatgaggggctggtgagagtgttccatctggacaccaaaaccagcctgagaactttcactggccataccagatcagtccatgccacatgtttcagctcagacaaggtccgcgtcctgtcagcgtcagacgacaaaaccacgcggctctgggacctggctacaggcgaggcggtccagacgctgaccggtcaccaggactacgtccggtcactcgccgtctgcaagtcctcagcagacatgtggatcactggaagctatgaccacacagtccgcatgtgggacagcagaacccaggagtcgaccatgacggttgaccatggatacccggtggaggctgtgctcatgtttcctcacggtaacatgttcctgtcagccggtggaaactgtgtcaaggtttgggacgccttgggcggcggccgtctcctagcaacctgcaccaaccatcacaagaccgtcacgtccctcgctttcaactctacatgtaccagactcctctcagcctcgctggacaggcacatcaaggtctatgatgttgcaattggcacctaccagtgtgttgccagcctgaactacccctcccctatcctgagttttggagtctcccccagcgaggatgttgttgctgtggggtgtgcagacgggatgctgtctatccagcgtcgcaaacaggaagactcgtctgcgaaactagcgctgaggcagaggagaaagagaggcggtgccaatcgcaggtactacggcagaggtggggactacagaccagtggttgccgactactctgtcactcacaggcagaaggagcagctcaagaagtttgacaaacatcttaagacgttcagcagcaccaaggcattggacgaggccttgaagccatgctaccccgctgaggttaccgttggagttatccaagaactgatccgacgcggatcgatcacagaagctctcgccggtcgggacgagaagggtttagagttgctgctcacttttctctgtcgctggacgtgcgaggaaaaatactgccgcgttcttctggatgttacaacgttagtgatcgacacgtacgcaggggttgtgggacagtctgagaaggtagacaggctgttacagaagctgttacggtcggttcagcgggaaacgaaccaccaggaacaactgttgaacacgctgggctcactggagactctgctcgcagccgcacagagcacgaactccagctaa

SEQ ID NO: 11241 - protein, 505 aa, Branchiostoma floridae
MAASFKQTAAVSAPRVGKKQTPDAAYWGDLEFPVTVKEYGAVSCVDFCPVEPNSFAVTASDRVQIYNSRTNKVEKVLTRFKEPARSGRFRGDGELLVAGGDEGLVRVFHLDTKTSLRTFTGHTRSVHATCFSSDKVRVLSASDDKTTRLWDLATGEAVQTLTGHQDYVRSLAVCKSSADMWITGSYDHTVRMWDSRTQESTMTVDHGYPVEAVLMFPHGNMFLSAGGNCVKVWDALGGGRLLATCTNHHKTVTSLAFNSTCTRLLSASLDRHIKVYDVAIGTYQCVASLNYPSPILSFGVSPSEDVVAVGCADGMLSIQRRKQEDSSAKLALRQRRKRGGANRRYYGRGGDYRPVVADYSVTHRQKEQLKKFDKHLKTFSSTKALDEALKPCYPAEVTVGVIQELIRRGSITEALAGRDEKGLELLLTFLCRWTCEEKYCRVLLDVTTLVIDTYAGVVGQSEKVDRLLQKLLRSVQRETNHQEQLLNTLGSLETLLAAAQSTNSS

SEQ ID NO: 11242 - DNA, 1512 bp, Branchiostoma floridae
  CDS (1)..(1512)
atggctgcctccttcaaacagacggcggcggtttccgcgccacgtgttggtaagaaacagacgcctgacgccgcgtactggagcgacttggagttcccggtgacggtgaaggagtacggcgccgtctcgtgcgtggatttctgcccggtcgagccacactcgttcgcggtgaccgcaagcgatcgggtgcagatttataacgccaggacgaacaaagtagagaaggtcctgaccagatttaaggagcctgctcgcagcggccgtttccgtggtgacggggagctgctggttgccggggccgatgaggggctggtgagggtgttccatctggccaccaaaaccagcctgagaactttcactggccacaccaggtcagtccatgctacatgtttcagctcagacaaggtccgcgtcctgtcagcgtcggacgacaaaaccacgcggctctgggacctggccacgggcgaggcggtccagacactgaccggtcaccaggactacgtccggtcactcgccgtctgcaagtcctcagctgacttgtggattactggcggttatgaccacactgtccgcatgtgggacagcagaacccaggagtccacgatgacagtcgaccatggacaccctgttgaggctgtgatcatgtttcctcacggtaacatgttcctgtcagccggtggaaactgtgtcaaggtttgggacgccctgggcggcggccgtctcctagcaacctgcaccaaccatcacaagaccgtcacatctctcgccttcaactcctcttgtaccagactcctctcagcctcgctggacagacacatcaaggtctacgatgttgggacctaccagtgtgtggccagcctgacctacccctcccctatcctgagttttggagtctcccccagcgaggatgttgttgctgtggggtgtgcagatgggatgctgtcaatccagcgtcgcaagcaggaggactcgtctgcgaaactagcactgagacagcggaaaaggagaggggcagccaatcgcaggtactacggcagaggtggagactacagaccagtggtcgccgactactccgtcactcacagacagaaggaacagctcaagaagtttgacaagcatcttaagacgttcagcagcaccaaggcattggacgaggccttgaagccatgctaccccgcagaggttaccatcggcgttatccaagaactgatccgtcgcggatcgatcacagaagctctcgctggccgtgacgagaaggggttagagttgctgctcacgtttctctgtcgttggacgtgcgaagagaaatactgccgcgtgcttctggatgttacaacgttggtgatcgatatgtacgcaggggttgtgggacagtcagagaaggtagacaggttgttacagaagctgttacggtcggtacagcgggaaacgaaccaccaggaacaactgttgaacacgctgggctcgctggagactctgctctcagctgcacagagcaagaactccagctaa

SEQ ID NO: 11243 - protein, 503 aa, Branchiostoma floridae
MAASFKQTAAVSAPRVGKKQTPDAAYWSDLEFPVTVKEYGAVSCVDFCPVEPHSFAVTASDRVQIYNARTNKVEKVLTRFKEPARSGRFRGDGELLVAGADEGLVRVFHLATKTSLRTFTGHTRSVHATCFSSDKVRVLSASDDKTTRLWDLATGEAVQTLTGHQDYVRSLAVCKSSADLWITGGYDHTVRMWDSRTQESTMTVDHGHPVEAVIMFPHGNMFLSAGGNCVKVWDALGGGRLLATCTNHHKTVTSLAFNSSCTRLLSASLDRHIKVYDVGTYQCVASLTYPSPILSFGVSPSEDVVAVGCADGMLSIQRRKQEDSSAKLALRQRKRRGAANRRYYGRGGDYRPVVADYSVTHRQKEQLKKFDKHLKTFSSTKALDEALKPCYPAEVTIGVIQELIRRGSITEALAGRDEKGLELLLTFLCRWTCEEKYCRVLLDVTTLVIDMYAGVVGQSEKVDRLLQKLLRSVQRETNHQEQLLNTLGSLETLLSAAQSKNSS

SEQ ID NO: 11244 - DNA, 1587 bp, Vitis vinifera
  CDS (1)..(1587)
atggcggaacctcaacaagcactctccaggaccttcccagtgaagcctaaactcaaagcaaaatccaaaaaaccctcaaaaaccccagaatccaagtactggtcgtccttcaaatctcacaccattcccaatctcatctcttccataacctctttatcattctctccggcgacccctcaccacttcgccgccgcctactccacctccctcaccctcttcaactccaaaactctcgaacccatctcctccatctcctccttcaaagacgtcgtttcatgcgcctccttccgctccgatggcctcctcatcgccgcctctgaccactccggccttgtccaggtcttcgacgtcaagacccgaacagctcttcgaaagctccgcggtcacactcggccggttcgactcgttcggtacccgcgttccgataagctccacttgttctccgggggcgacgatgcagtggtcaagtactgggatgttgctgccgagtcaggagttgtggagttccggggccacaaggattatgtccgctgcggagatgggtcaccggcgagttctgagttgtttgccacggggtcgtatgatcatacggttaaggtttgggatgttagagtttcgaattcggatgcagcgatgaagataaatcatgggaaaccggtggaagatgtgatcttcttgccgtccggtgggttaattgcaaccgccggaggaaattgtgtgaagatttgggatgtgattggaggagggaagttgttgtattcaatggagaatcataacaagactgttacctcaatttgtgtgggtaagattgggagggatggtggtgagggttcagaacaatatagggttttgagcgtgggcctggatgggtatatgaaggtttttgattactctaagttcaagataactcattcgatgaggttcccagcaccgcttttatcaattgggttctcgcctgattgtgcaacgcgggcaattggtacttcaaatggggttatatatgctgggaagaggaaggtgaagggggaagttgagagtggcttgagggagtttccaagtttgggtttgatggaggaaccacagaggcgggtactgaggccctcttattttcgatatttccataggagccaaggagagaaaccttctgagggggattacctcattacaaggccaaagaaagtgaaaatcgcagagcatgataagttgttgaagaagtttaggcataaggatgcttttgtgtctgccttaagtgggaagaaccctgaaaatgtggtggctgtgatggaggaattggtagcaaggaagaagttgttgaaatgtgtttcgaatttggatacagaggagcttgggttacttctggcattcttgcataggcattcaactgtgccaagatatgcaggtttgttaatggggttgacaaagaaagtggttcagatgcgagctgaagacattatagcttctgatgtcttgaagggccatataagaaacctgaagcggtcagttgaggaggaggttaggatacaacaatccttgcaagagatacaaggtataatttctcctttactgaggattgctggaagaagataa

SEQ ID NO: 11245 - protein, 528 aa, Vitis vinifera
MAEPQQALSRTFPVKPKLKAKSKKPSKTPESKYWSSFKSHTIPNLISSITSLSFSPATPHHFAAAYSTSLTLFNSKTLEPISSISSFKDVVSCASFRSDGLLIAASDHSGLVQVFDVKTRTALRKLRGHTRPVRLVRYPRSDKLHLFSGGDDAVVKYWDVAAESGVVEFRGHKDYVRCGDGSPASSELFATGSYDHTVKVWDVRVSNSDAAMKINHGKPVEDVIFLPSGGLIATAGGNCVKIWDVIGGGKLLYSMENHNKTVTSICVGKIGRDGGEGSEQYRVLSVGLDGYMKVFDYSKFKITHSMRFPAPLLSIGFSPDCATRAIGTSNGVIYAGKRKVKGEVESGLREFPSLGLMEEPQRRVLRPSYFRYFHRSQGEKPSEGDYLITRPKKVKIAEHDKLLKKFRHKDAFVSALSGKNPENVVAVMEELVARKKLLKCVSNLDTEELGLLLAFLHRHSTVPRYAGLLMGLTKKVVQMRAEDIIASDVLKGHIRNLKRSVEEEVRIQQSLQEIQGIISPLLRIAGRR

SEQ ID NO: 11246 - DNA, 1605 bp, Populus trichocarpa
  CDS (1)..(1605)
atggcagaccttcttgtagaacaaccccgagaaatcaccatctctaaaaccttccctacaaaaccaaagctaaaacccaaagctaaaaccccatcgaaaacccctgaatccaaatactggtcttccttcaaatcccaccaaatttcaaacctcatctcctccatcccttccatagatttctcacctatatccccacaccaatttgccgccgccaattccgcctccctcactctcttctcctcccaaacactctctcccacctccaccatctccttctccgatgttgtcacctcctgctccttccgctgcgacggctccctgatcgctgcctccgatctctccggccttattcgggtattcgatgtaaagacacgaacccctcttcgtcgcctgaagtcccatacgcgccctgttcgttttgttaagtacccgttactcgataagctacatttggtgtctggtggtgatgattctgttgttaagtactgggatgttgctggagagagtgtggtttcggacttgtatggtcacagggactatgcgaggtgtggtgattgctctccgattaatggagagatatttgttactgggtcttatgatcacactgtaaagctgtgggatgtgagggttgatagtaaggaatcagttatcgaagtgaatcatggaaagccagttgaggatgtgatttttttgccctcaggcggaatggttgcgactgcaggagggaatagtttgaagatatgggatttgattggaggagggaagatggtttattcgatggagagtcataacaagactgttacttctatttgtgtagggaaagtagggaaagagagtggagaggaggctttgcagtataggattttgagtgtggctttagatgggtatatgaaggtttttgattatgcaaaaatgaaggttactcattccatgaggtttcctgccccgcttatgtccattgggttttctccggattgtatgactagggtcattgggtcttccaatgggattatatttgctgggaggagaaaaggaaaggaggatgtgggagagagtaaatcagggaatttttgggcgctaggcagtgtagaggaaccacagaggcgggctttgaggccaacatattttaggtattttcataggagtcaaggggagaagccaaatgagggggatcatttgataatgaggccaaagaaggtgaaattgtcggagcatgataagttgttgaagaagtttaggcataaagaagcgctggtttcagttttgagtgggaagaatccagagaatgtggtggctgtgatggaggaaatggtggcaaggaggaagttattgaaatgcgttgtgaatttggatgaggaggagcttgggttgttgttgggtttcttgcataagcactcaactatgccaagacattcaggtttattgatgggcttgactaaaaaggtacttgaaatgcgggctgatgatattagagcttctgatgctttgaaaagtcatattagaaaccttaaaaggtcagttgaagaggagatcagaattcaacattcactacaagagatacagggtataatttctcctttattgagaattgccgggagaagatag

SEQ ID NO: 11247 - protein, 534 aa, Populus trichocarpa
MADLLVEQPREITISKTFPTKPKLKPKAKTPSKTPESKYWSSFKSHQISNLISSIPSIDFSPISPHQFAAANSASLTLFSSQTLSPTSTISFSDVVTSCSFRCDGSLIAASDLSGLIRVFDVKTRTPLRRLKSHTRPVRFVKYPLLDKLHLVSGGDDSVVKYWDVAGESVVSDLYGHRDYARCGDCSPINGEIFVTGSYDHTVKLWDVRVDSKESVIEVNHGKPVEDVIFLPSGGMVATAGGNSLKIWDLIGGGKMVYSMESHNKTVTSICVGKVGKESGEEALQYRILSVALDGYMKVFDYAKMKVTHSMRFPAPLMSIGFSPDCMTRVIGSSNGIIFAGRRKGKEDVGESKSGNFWALGSVEEPQRRALRPTYFRYFHRSQGEKPNEGDHLIMRPKKVKLSEHDKLLKKFRHKEALVSVLSGKNPENVVAVMEEMVARRKLLKCVVNLDEEELGLLLGFLHKHSTMPRHSGLLMGLTKKVLEMRADDIRASDALKSHIRNLKRSVEEEIRIQHSLQEIQGIISPLLRIAGRR

SEQ ID NO: 11248 - DNA, 1605 bp, Populus trichocarpa
  CDS (1)..(1605)
atggcagaccttcttgtagaacaaccccaagaaatcaccatctccaaaaccttcccaactaaaccaaagctaaaatccaaaccgaaaaccccatcaaaaacccctgaatccaaatactggtcttccttcaaatcccaccaaatttcaaacctcatctcctccatcccttccatcgatttctcacctatatccccacaccactttgccgccgccaattccgcctccctcacgctcttctccccccacacactctctcccgcctccaccatctcctcctccgatgtcgtcacctcctgctccttccgctgcgacggctccctcatcgccgcctctgatctctccggccttatccgggtattcgatgtcaagacacgaactccacttcgtcgcctgcggtcccacgcccgccctgttcgttttgtcaagtacccgttactagataagctccatttggtgtctggtggtgatgattctgtagttaaatactgggatgttgctggagagagtgtggttttggacctgtatggtcacagggactatgtgagatgtggtgattgctctccaactgatggagagatgtttgtcactgggtcttatgaccacactgtgaagctgtgggatgtgagagttgataataaagaatcagttattgaagtgaatcatggaaatcctgtcgaggatgtgatttttttgccttcaggcggaatggttgctacggcaggagggaatagtgtgaaaatatgggatttgattggaggagggaagatggtttattctatggagagtcataacaagactgttacttctatttgtgttgggaaagtagggaaagagagtggagaggaggctttgcagtataggatttttagtgtggctttagatggttatatgaaggtttttgattatgcaaaaatgaaggttactcattccatgaggtttcctgccccgcttatgtcaattggattttcgccggattgtatgactagggttattgggtcttccaatgggattatatttgccgggaggaggaaggcaaaggaggatgtgggagagagtaaagtagggaatttttgggcgctgggcagtgtagaggaaccgcagaggcgggctttgaggccaacttattttaggtattttcataggagtcaaggggagaagccaaatgagggggatcatttgataatgaggcaaaagaaggtgaaattggctgagcatgataagttgttgaagaagtttaggcataaagaagcattggtttcagttttgggtgggaagaatacagagaatgtggtggctgtgatggaggaattagtggcgaggaggaagttattgaaatgtgttgtgaatttggatgatgaggagcttgggttgttgttgggcttcttgcataagcactcgaccatgccaagacattctggtttattgacggggttgactagaaaggtactcgagatgcgggctgaagatattagagcttctgatgcattgaaaggtcatattagaaaccttaaaaggtcggttgaagaggagatcagaattcaacattcactacaagagatacagggtgtaatttctcctttattgagaattgctgggagaagataa

SEQ ID NO: 11249 - protein, 534 aa, Populus trichocarpa
MADLLVEQPQEITISKTFPTKPKLKSKPKTPSKTPESKYWSSFKSHQISNLISSIPSIDFSPISPHHFAAANSASLTLFSPHTLSPASTISSSDVVTSCSFRCDGSLIAASDLSGLIRVFDVKTRTPLRRLRSHARPVRFVKYPLLDKLHLVSGGDDSVVKYWDVAGESVVLDLYGHRDYVRCGDCSPTDGEMFVTGSYDHTVKLWDVRVDNKESVIEVNHGNPVEDVIFLPSGGMVATAGGNSVKIWDLIGGGKMVYSMESHNKTVTSICVGKVGKESGEEALQYRIFSVALDGYMKVFDYAKMKVTHSMRFPAPLMSIGFSPDCMTRVIGSSNGIIFAGRRKAKEDVGESKVGNFWALGSVEEPQRRALRPTYFRYFHRSQGEKPNEGDHLIMRQKKVKLAEHDKLLKKFRHKEALVSVLGGKNTENVVAVMEELVARRKLLKCVVNLDDEELGLLLGFLHKHSTMPRHSGLLTGLTRKVLEMRAEDIRASDALKGHIRNLKRSVEEEIRIQHSLQEIQGVISPLLRIAGRR

SEQ ID NO: 11250 - DNA, 1563 bp, Anopheles gambiae str. PEST
  CDS (1)..(1563)
atgtctcaattcaagaaaaccgatagtaaaatctacgcaaaaaccgcgacggtactgtcgccggacacaatctattggaaaaagctaggggtgcccacgctggtaaaagagttcggtgccatcgactacatcgacttctgtccggtagaaccgtacctgttcgcggtgactgcctcggtccgcgtgcagatctacaaccccattacaaagctcgtggtgaaaaacataacaaagttccaagaggcagcccacggcggatcgtttcgcaaggatggcaatctgctggtggcgggcgacgaactcggcaaagtgcgcctgttcgatgtgaccactcgcacgatcctacgatacttcgagggtcacaaggctccggtgcatcgcacgttctttaccgcggacgggcaccatgtagcgagcttctcggacgatcgtaccgtcgggtactgggatattgcgacggaaaaccatctgcacacgttcaccggccacgaggactacattcgggccggttgcaccagcccggtcagcccgaacataatcctgtccggcgggtatgaccgtaaaatccgaatgtacgatacgcgtgtgaaagagtgcgtcatgaccgtggaccacgggcagccggtagaatcgttggtgtttctgccgagcggtggcatcttcatcagtgccggcggtacctcggtgaacgtatacgatgccctgtccggcggccggcagctggcccagctctcccagcaccacaaaacggtcacctgcctgcagctggccagcgatggcaagcgtctgttttccggcagcttggaccggcacgtgaaggtgtacgacatagccacctaccaggtggtgcacacgatcgacagctcgaacgcgattctgagcctcggcatctcgaagaacgacgacacgctcgtgacgggcatggtggacggtttgatcgccatctatcggcgcgagggcgatccgcgggacgagcagccgacccagcgggtgcgcaagggccaccaccagcacatcttcgagccggccgaccagcaggtggaggagttcaagttcgtgcgctacgaggggcacgatcgggcactgcgtaagtacgagtacaagaaggcactggatgcggtcatggcggccaaggtaaggggaatgtggccggagaaaaccgtggccctcatcaaggagctaatccggcggaagggtctgcaccgggcgctggacgatcgttcgcccgagtcgttggtgcacttcatcaactttctcacgcgccacatcggcgactatcggttcacgcccgtgctgatcgacgcgggcaacattctgctggacgtgtacgaagattcgctcgaaaagtttgccggcacgatcgtgggcaaagcgttcgtgacgctcgcgaacaagctgcagacggaggagcagctggtgctggagttcctgaacctgcagggtatgctggacatgatttcggtggcggcggatacggcggaaccggacaccgtggacgatgcgatcgcaccgtacgacgcctcgaacaaggcgaagaatcaaacggtcatatcggtcgactga

SEQ ID NO: 11251 - protein, 520 aa, Anopheles gambiae str. PEST
MSQFKKTDSKIYAKTATVLSPDTIYWKKLGVPTLVKEFGAIDYIDFCPVEPYLFAVTASVRVQIYNPITKLVVKNITKFQEAAHGGSFRKDGNLLVAGDELGKVRLFDVTTRTILRYFEGHKAPVHRTFFTADGHHVASFSDDRTVGYWDIATENHLHTFTGHEDYIRAGCTSPVSPNIILSGGYDRKIRMYDTRVKECVMTVDHGQPVESLVFLPSGGIFISAGGTSVNVYDALSGGRQLAQLSQHHKTVTCLQLASDGKRLFSGSLDRHVKVYDIATYQVVHTIDSSNAILSLGISKNDDTLVTGMVDGLIAIYRREGDPRDEQPTQRVRKGHHQHIFEPADQQVEEFKFVRYEGHDRALRKYEYKKALDAVMAAKVRGMWPEKTVALIKELIRRKGLHRALDDRSPESLVHFINFLTRHIGDYRFTPVLIDAGNILLDVYEDSLEKFAGTIVGKAFVTLANKLQTEEQLVLEFLNLQGMLDMISVAADTAEPDTVDDAIAPYDASNKAKNQTVISVD

SEQ ID NO: 11252 - DNA, 1668 bp, Magnaporthe grisea 70-15
  CDS (1)..(1668)
atggcggctgaagttgtgccattacagcagctcaagctgcccgcgggcccctcgcctgtgacggctgagcagaaatactggaagtcgttcaccaaccaaaagtcgcacacctcgacggcgtcatggcccgtcacccacatcagtttccccgcgccgggatactcgtcggcaacctcgaccactgccgtcaagaacaatgatgttttcgccgtcaccgctggtccccgagtcgatgtctacagcatacggcgccgtgagcccctcaagaccatcagccacttcgacacggctgcccgttccggcgagatccgaccggatggccgagttttgctggctggtgaggactcgggaaggatgcaggtctttgacgtcgctgggtcgacacgtgcggctctgaggacctggaatatacacaagcagcctgtctgggtcaccaagtggtcgccgaggcctggcgacctgaccacactcatgagctgttccgatgacaagactgttcgcctctgggacctcccctcggccgacccgacgagaacgttcgttggtcaccaggactacgtgcgcagcggtgccttcatgacggggcctgccgccacaggaagcggcaacattctcgtcaccggctcatacgattcaaccgtgcgactctgggacgcccgtgttccgggcccggctgtgctcaccttccaacacacggcccccatcgaggcggtactacctttgccgtcaggtaccaccatcctcgccgcgtcaggaaactccatctctgttctcgacgtcgtgcacgcccggcctctgcgtaccataaccaaccaccaaaagactgtcacttcactctgcctggccagtaacggccgccgtgtcttgtcgggcggcctcgacgggcacgtcaaggtttacgacgcagagtcgggcggctggaacgttgtcgccagcacaaaatacccatcccccgtcacgtcgctgtccgtcatctcggccggcgctaacgcggccgaccgccacctggccgtcggcatggcgtccggtcttctcaacattcgtacacgcctgacgggcaccgcggccgaccgcgaacgcgagctcgaggtcgcccgcaccatgactgaagtgtcggacttgcgcgccatagacgccgcgcgcgataagaggaagcgcgccgcccagcactcgctcgccctggacaaggccggcctgagcgccgactttgtcatcgacgccacgggcggcaaggggcgcaagacccgcgccgccaaggagcctaggtggcagaaggacttgaggcaacagaagtaccggcaagcgctggaccgagtccttgatgtcacgtccccggaccactcgcgcatggccgtgctgacgctgctgacggccctgcgccaccgcagcgccctcgtgcacgccctcgagggccgcgacgaggagacggtgcagcccatcctcgcctgggtcactcgccacgtcgtcgacccgcgctacgtctcggtctgcgtcgacgtcggcctccaccttctggacctgtacgcagagtacgccgacaggtcccccgaactcgagcagggtttccgcatgctcaggagccaggttatcaaggaggtcgagagggcacagatggcctgccagaccggtggcatgctggagactttgatggtgagctccgaggcctga

SEQ ID NO: 11253 - protein, 555 aa, Magnaporthe grisea 70-15
MAAEVVPLQQLKLPAGPSPVTAEQKYWKSFTNQKSHTSTASWPVTHISFPAPGYSSATSTTAVKNNDVFAVTAGPRVDVYSIRRREPLKTISHFDTAARSGEIRPDGRVLLAGEDSGRMQVFDVAGSTRAALRTWNIHKQPVWVTKWSPRPGDLTTLMSCSDDKTVRLWDLPSADPTRTFVGHQDYVRSGAFMTGPAATGSGNILVTGSYDSTVRLWDARVPGPAVLTFQHTAPIEAVLPLPSGTTILAASGNSISVLDVVHARPLRTITNHQKTVTSLCLASNGRRVLSGGLDGHVKVYDAESGGWNVVASTKYPSPVTSLSVISAGANAADRHLAVGMASGLLNIRTRLTGTAADRERELEVARTMTEVSDLRAIDAARDKRKRAAQHSLALDKAGLSADFVIDATGGKGRKTRAAKEPRWQKDLRQQKYRQALDRVLDVTSPDHSRMAVLTLLTALRHRSALVHALEGRDEETVQPILAWVTRHVVDPRYVSVCVDVGLHLLDLYAEYADRSPELEQGFRMLRSQVIKEVERAQMACQTGGMLETLMVSSEA

SEQ ID NO: 11254 - DNA, 1680 bp, Gibberella zeae PH-1
  CDS (1)..(1680)
atgaaaaaaaatcacggttcaaagcaacaagaggcagtccagcagctcaactttcaccaccacaacaaaagtccgtcatcgcgaatcgacacaatggcagctcaggtgggacctctcccgcagctcaagctgccttcgggccctacgcccatgacagcagagcagcgatactggaaaacctttaagaatcagattctgattccgtcgcctacgaattatcccatcgtccacatctcgtccaacagcgaatccttcgcaattacgacaggcacgcgcatacaaatattctcgaacagaacgcgcaagcttctcaagaccgtcactcgcttcgcagatgttgcgcgcagtggtgaactcagaagggatgggagggtcctggctgcaggtgacgacaccggaaagattcaggtctttgatattagttccagggccatcctcaagacatgggcgcatcacaagcagcccgtatggaccaccaagttctccccgaccgagttgaccactcttttgagtgcaagcgacgacaagaccgtccgactttgggatcttcctagcaatgaccctaccgctaccttcgttggccactccgattatgttcgatgcgccaactttatgcctggcaccatgtccaacatgattgtctctggaagttacgattcgaccgtcaagctttgggacccccgaacaggaagaaacagcgccgtcatgactttcaagcatgcagcacctattgaggacgtcctgtccatgccaaccggaaccaccgttcttgctgctgctggtgaatcgatcagcgttctcgatctggtcggcgcgcgccctctacacatgatcaccaaccaccaaaagactgtcacagctctcagcctggcatccaatggccgacgactgatcagtggtggtcttgagggtcacgtcaaggtttttgaaacaaccggatggaatgtagtctcaagcaccaagtatcagtctcccgtcctgtcagtcaaggtcatttcctctggcgacgattccgattcaagcgaccgccacctcgctgttggtatgcagtcgggtgtcctcagtgtgcgaacccgccttactgcccctgaagcaaacagggaggccgagcgtgagaaggaaatggcagcccttatagccggcacaatagacgctcatgatgctaagaaaaagaagcgcaagcgtcgggtcaccgccgccaagaagctggacatgattggtgaaggggctgacgttgtgatcgcaaacgagcctcgcacacacaagaagaaggagcgctcatggcaaagtgatctacgacacgcccgatatgcctgtgctctggacctggtccttgacaagcactctcctgaccactctcctcttaacgtcctcacccttctgcttgctctccgccaccgaagcgcccttcgagatgccctggagtcccgggatgagcacacagtccagcccatcctgaagtgggtttgtggccatatctgcgacccccgttacgtgagcgtatgtgtcgaggtcggccttcaccttatagagctctacgccgagtttgcaggcggctcagcagaactgcaagagggattcaggactttgtaccgccgtgttaaggccgaggtggaaagagcccaatcagcatgccaaacgggaggtatgctagagagcttgatggccgggatcctctaa

SEQ ID NO: 11255 - protein, 559 aa, Gibberella zeae PH-1
MKKNHGSKQQEAVQQLNFHHHNKSPSSRIDTMAAQVGPLPQLKLPSGPTPMTAEQRYWKTFKNQILIPSPTNYPIVHISSNSESFAITTGTRIQIFSNRTRKLLKTVTRFADVARSGELRRDGRVLAAGDDTGKIQVFDISSRAILKTWAHHKQPVWTTKFSPTELTTLLSASDDKTVRLWDLPSNDPTATFVGHSDYVRCANFMPGTMSNMIVSGSYDSTVKLWDPRTGRNSAVMTFKHAAPIEDVLSMPTGTTVLAAAGESISVLDLVGARPLHMITNHQKTVTALSLASNGRRLISGGLEGHVKVFETTGWNVVSSTKYQSPVLSVKVISSGDDSDSSDRHLAVGMQSGVLSVRTRLTAPEANREAEREKEMAALIAGTIDAHDAKKKKRKRRVTAAKKLDMIGEGADVVIANEPRTHKKKERSWQSDLRHARYACALDLVLDKHSPDHSPLNVLTLLLALRHRSALRDALESRDEHTVQPILKWVCGHICDPRYVSVCVEVGLHLIELYAEFAGGSAELQEGFRTLYRRVKAEVERAQSACQTGGMLESLMAGIL

SEQ ID NO: 11256 - DNA, 1554 bp, Candida glabrata CBS 138
  CDS (1)..(1554)
atgtcttcgtcgcacccacgcatagttacatcccgggctgctgtgctgccgcagcagaccactgcggagcagcggtactggcggcagtacgctgctacgcagctggtgaaggagcacaacagtgttacgcatgtagcgttcaatccgcagaagccgcacgacttcgctgtaacgtcgtctaccagggtgcaggtgttctcctcgcggacgcgccaggcgatcaagaccttctcccgtttcaaggacgtggtgtactctgcgtcgtaccggaaggacggtaagctgctgtgtgccggtgacgccacgggtctcgtgtccgtctatgactcgtacaacccgcggacgctgctggtgtctgtagccgcctcccagcaccccacgcacgtcaccaagttccacgaccacgacttgaagacgctggtctccgcgagcgacgaccgtgtcaccagggtgtgggacatctcgcacgcctacgagccccagctggagctgacgggtgccgccgactacgtgcggacgctgtgcttcgtgccagcggcaccgcacctggtggtcaccggctcctacgacggcgcgctcagactctatgacaccagggcaggcagcaagccccagcacacactggtgcacgaccagcccgtcgagaacgtcgtcgccatctcgcccacacagctggtctcttgcggtgggcccaacttcaaagtctgggacctgaccagcaacaagaagatattcgagcgcgcgaacttcaacaagaccgtcacctgcctcgactacgtgaacctccctagcgactccggcctggcatcaaactcagcgctgctggcgtcctcgctggacggccacgtcaaggtgttcgacccgctggacaacttccaagtgaagttcggctggaagttctccagcgcagtgctgagctgcgcagtgtcccccagcgacgcccaaggcagcaggcatctagtagcaggtctcacatcaggactgctggccatcagaaccaagaagaaagagaagaggaacagccacctggctgtggacgactacacagccggctccacgggcccaaagaagagcaacaacttccaaagaatgatgcgtgggtcccagtaccaaggtgacctagaacatataatccacgatgacaaagtgaaacagcagcgccgcttgcgcactttcgaaagatacatcaaccagttcaagtgggctgaggcactcgattgcgctttcgtgcccggtatggccaaagaactcactttgactatcctccaggagctgcgcaagcgtggcaagatacgggtagcactccagaacagagacgagtcctcgctagagccactacttaactggtgtctgaaaggtatagaagacgtaaggtcagttaacgtggtcgtcgactgggtcacagtggtcctggagatgtacggccaagtagcccaggagtccccagtgctgaacgaaatggtggtggcactacgtaacaaggtcagagaggaagttcacaaagcagaagaggcccagaggatagaaggcatgctccaattgctaacgaactag

SEQ ID NO: 11257 - protein, 517 aa, Candida glabrata CBS 138
MSSSHPRIVTSRAAVLPQQTTAEQRYWRQYAATQLVKEHNSVTHVAFNPQKPHDFAVTSSTRVQVFSSRTRQAIKTFSRFKDVVYSASYRKDGKLLCAGDATGLVSVYDSYNPRTLLVSVAASQHPTHVTKFHDHDLKTLVSASDDRVTRVWDISHAYEPQLELTGAADYVRTLCFVPAAPHLVVTGSYDGALRLYDTRAGSKPQHTLVHDQPVENVVAISPTQLVSCGGPNFKVWDLTSNKKIFERANFNKTVTCLDYVNLPSDSGLASNSALLASSLDGHVKVFDPLDNFQVKFGWKFSSAVLSCAVSPSDAQGSRHLVAGLTSGLLAIRTKKKEKRNSHLAVDDYTAGSTGPKKSNNFQRMMRGSQYQGDLEHIIHDDKVKQQRRLRTFERYINQFKWAEALDCAFVPGMAKELTLTILQELRKRGKIRVALQNRDESSLEPLLNWCLKGIEDVRSVNVVVDWVTVVLEMYGQVAQESPVLNEMVVALRNKVREEVHKAEEAQRIEGMLQLLTN

SEQ ID NO: 11258 - DNA, 1563 bp, Kluyveromyces lactis NRRL Y-1140
  CDS (1)..(1563)
atgtcgtctgtgagacctagagtgacgccggtaaaggctcctgtgttaccaaagcagaccaccccagagcagaggtactggaggtcttattcatctactcagcttgttaaagagcacaatgcagtgactcatattgccttcaatccccagcatccacatgattttgcagttacctcttctactagggtacaggtcttctcgtcaaggacaagacaagtgatcaagacgttttctaggtttaaagatgtggtgcattcggccactttccgtcaagacggtaaacttttagtagcaggtgacgctactgggttagtgtccgtttatgatagttataatccacgtactttgttgctttctatacaagcttcgtcgcatcctacgcatgtgacgaagtttcacgatcaggataacaagactttggtgacggcaaacgacgatagagtagtgagactatgggatgtttctcatgcttatgaacccactttacagttaactggagcatctgattatgttagatcagtctgctttgtgccaaatgctccacatatggtcgctacagggtcgtacgatggagtagttagattgtacgatattagaacgaaatcagataaaccacagacaactttggatcacggtcttcctgtggaagatatcacagccatatctcctactcagcttgcatcgtgtggtggtaacgggttcaaagtatgggacttgactagcgatagagccctttgtgaacgtcaaaatttcgcaaagacggtcacctgtttgaattacacaaatatgggagaagaatcaccaatgagttccgtactagttgcatcctcgcttgatggtcatgttaagatcttttccccgttggagaacttccaattcaagtttggctggaagtttagcaacgctgtgctaagttgtgcagtctcaccaggcgatgcgcaaggtaataaacatttcgttgcaggtttatcctcaggaattctagccatcaagacgaagaagaagtccaaaaagattaacctcgctgatgtctctgatttggaggatttaccattacaacagcaagagaagtctgcgaaatccaacaatttccagagaatgatgagagggtccgaatacagaggtgatcaagagcatattatacacaacgataagccaaatcctcagcgtaagttgcgtcaattcgaaaggcatatcaaccaattcaaatggtctgacgcattagattctgcatttatccccggtatggctaaagaattaactttaacggtattacaagaactaaggaaaagaggtaaaatcaaggttgcattatacggtagagacgaaagttctctagaaccactactcaactggtgcttgaagggaatagaagatgttagaagtgcaccaattgttgcagactggattgcggttgtaattgaactctacggtagtgtactggagaagtccccagtacttgaagagatggtaatcactctaaagaaaagagtaagggaagagatccgcaaagcaaaagaagcacaaaagatagagggtatgctccaattgttaacaaactga

SEQ ID NO: 11259 - protein, 520 aa, Kluyveromyces lactis NRRL Y-1140
MSSVRPRVTPVKAPVLPKQTTPEQRYWRSYSSTQLVKEHNAVTHIAFNPQHPHDFAVTSSTRVQVFSSRTRQVIKTFSRFKDVVHSATFRQDGKLLVAGDATGLVSVYDSYNPRTLLLSIQASSHPTHVTKFHDQDNKTLVTANDDRVVRLWDVSHAYEPTLQLTGASDYVRSVCFVPNAPHMVATGSYDGVVRLYDIRTKSDKPQTTLDHGLPVEDITAISPTQLASCGGNGFKVWDLTSDRALCERQNFAKTVTCLNYTNMGEESPMSSVLVASSLDGHVKIFSPLENFQFKFGWKFSNAVLSCAVSPGDAQGNKHFVAGLSSGILAIKTKKKSKKINLADVSDLEDLPLQQQEKSAKSNNFQRMMRGSEYRGDQEHIIHNDKPNPQRKLRQFERHINQFKWSDALDSAFIPGMAKELTLTVLQELRKRGKIKVALYGRDESSLEPLLNWCLKGIEDVRSAPIVADWIAVVIELYGSVLEKSPVLEEMVITLKKRVREEIRKAKEAQKIEGMLQLLTN

SEQ ID NO: 11260 - DNA, 1506 bp, Debaryomyces hansenii CBS767
  CDS (1)..(1506): transl_table=12
atgtcatcaagtaaagaaagagtaccacaagtaaggaacccaactttaccctctcaaactaccccagaacagaggtattggaggggattttcaaatccgcaattagttaaagagaattatccgatcaccagtatcgatttcaacccagtatctccaaatgattttgctgtaacttcttcgaccaggattcaggttttttcatcaaagacaagacaggttataaagacattttctagattcaaggacacagtttattctggtcaatataggtatgatggaaaattgcttgtagcagcagatgctagtggtttagtgacaatttttgatagctaccaacctcgttcattattggttagtttgaatccatcgagtcatccaacccatgttgctaaattccacccaactattggaaatcaattaatcactggatcagatgacagaatagtcagattatacgatatttcgcaaaccacaaagggcccaataacggaattcaatgattcctaccatggtgattatataagaagtgcaaatttcattccagggaatccaaatttgatcacaactgggtgttatgatggtatagtgagaatttttgataccagacaacaacaggtcgtagctaaattcaatcaaggaaatccagttgaggatcttttggcattgtcaccaactacattagtgagtgctggtggtccacaagttaaaatatgggacttaactagaggttcgcagatcaatgaattgaataacttcactaagaccgccacaacattacataacacgggtgatagaggattactcgttggatcattagatggtcatgttaagatattcgactcaagctcatctaattgggatgtcaagtttggatggaaattcggaagtggtggtgttttgagttgtggtgtttctccttctcctaatcacaagcatttcgttactggtttgacatcaggtttgatatctatccgtaccagaaagactgagcctaaggttaaacaaggtgttaaggagtataagtctaatgcgtacaataaaatgatgagaggttctgattacttaggtgaagaagaacaccgtatcattaattctgctactactcaaactaagaaattaaagcaattcgagaagcatttaaatgccttcagatggtcggaagcattggatagtgccttcgcaacgggtttacctaaagaacaaactgttactgtattaaatgaattgaagaagagagggaaaatcagaatttcattgtatggtagggatgagatatcattattgccaattttgcaatggtttattaaaaatttagaagacgtaagatctattaatttaatttgtgattttattggtgtgatgttggaaatgtatgggacattaatcgataagagtgccgtgttagaagagagctttgcaactttattgaaaagaattaatattgaaattaaaaagtgtaaagaagctaatgaaataggcggtatgctagaacttttaacagtttaa

SEQ ID NO: 11261 - protein, 501 aa, Debaryomyces hansenii CBS767
MSSSKERVPQVRNPTLPSQTTPEQRYWRGFSNPQLVKENYPITSIDFNPVSPNDFAVTSSTRIQVFSSKTRQVIKTFSRFKDTVYSGQYRYDGKLLVAADASGLVTIFDSYQPRSLLVSLNPSSHPTHVAKFHPTIGNQLITGSDDRIVRLYDISQTTKGPITEFNDSYHGDYIRSANFIPGNPNLITTGCYDGIVRIFDTRQQQVVAKFNQGNPVEDLLALSPTTLVSAGGPQVKIWDLTRGSQINELNNFTKTATTLHNTGDRGLLVGSLDGHVKIFDSSSSNWDVKFGWKFGSGGVLSCGVSPSPNHKHFVTGLTSGLISIRTRKTEPKVKQGVKEYKSNAYNKMMRGSDYLGEEEHRIINSATTQTKKLKQFEKHLNAFRWSEALDSAFATGLPKEQTVTVLNELKKRGKIRISLYGRDEISLLPILQWFIKNLEDVRSINLICDFIGVMLEMYGTLIDKSAVLEESFATLLKRINIEIKKCKEANEIGGMLELLTV

SEQ ID NO: 11262 - DNA, 1500 bp, Yarrowia lipolytica CLIB122
  CDS (1)..(1500)
atgtccgcccccttgaaccggttgacgattgctaaggaggtcaaaaagggctccgacttgacgcccgagcaaaaattctggaaaacctaccgttcgcctctgctcgtcaaagagtacaatgccatctctcacgtttccttcaaccatcacaatgactttgccgtcacctcgtctactcgaatccagatcttctctggaaagacccgaaaagtcaccaagactatctctcgtttcaaggatactgtatactgcggcgagttccggtctgatggtaagctgattgtggccggtgatgctacaggtctggttcagatcttcgatgccgtgtcgagaaacattctggtgactctgcaggcgtcccaactggccactcatgtgactaagttccaccccacaaacctcaccactctcctcacagcctccgacgaccgaagcgtcaagctctacgatatcaccagctccactcctctgatcgagtttgagggcgctcaggattacgttcgatgtggagagtttgtcgatgccaacgttgtcgctgctggttcgtacgacggaactgttcgactctacgacgcccgatccggaaagacccccatctcttctctggctcaggatcacccggttgaggatgtcctctaccacaacggaatggtgttgtctgccggaggtcccattgtcaaggcctgggacatgaccaccggaaagaccatccgacaaatgggcaacttcagcaagaccgttacttgcctggcccctactcacggtgcttctggattcttcgctggctccctagacggccatgtcaaggtctttgatgatacctcattcaaggttacctacggctggaagtacggctccggagtgctctgtactggtatgtctctagactcccagcatattgtggccggtctggtttccggtattgtcgctgttcgaacccagcagcccaagaaggacgagaagatcagcaacggacgggttctggaccagaaggctgctgttgaggaggagaagaagaagaaggcagagggacccgtgcttggaggaaccaagtacgagggtcagtttgagcatgtcattgtcgaggagcacgagcggcccaacaagaagctgctgaagcgatatgaaaacctgcttctcggattccgatggggtgatgctctcgatgctgcactgtctggagagcatctggagacctctgttctggctctggaagagctcaagaagcgaggtaaggtgcgagctgcactgctgaaccgagatgaggactctctggagcctctctttgagttcgctaccaaggccattgctgactcgcgatacatcaacattgttgctgactacgttgcagtcgtgctggacatgtacactagtgtgattaccaagagcccgatactcgaagagcgggtgtctgagttctacgacgctctcaagtccgaggtcgagactgctaaggagagcaagaagatccagggtatgttggagctcctcagtgtttag

SEQ ID NO: 11263 - protein, 499 aa, Yarrowia lipolytica CLIB122
MSAPLNRLTIAKEVKKGSDLTPEQKFWKTYRSPLLVKEYNAISHVSFNHHNDFAVTSSTRIQIFSGKTRKVTKTISRFKDTVYCGEFRSDGKLIVAGDATGLVQIFDAVSRNILVTLQASQLATHVTKFHPTNLTTLLTASDDRSVKLYDITSSTPLIEFEGAQDYVRCGEFVDANVVAAGSYDGTVRLYDARSGKTPISSLAQDHPVEDVLYHNGMVLSAGGPIVKAWDMTTGKTIRQMGNFSKTVTCLAPTHGASGFFAGSLDGHVKVFDDTSFKVTYGWKYGSGVLCTGMSLDSQHIVAGLVSGIVAVRTQQPKKDEKISNGRVLDQKAAVEEEKKKKAEGPVLGGTKYEGQFEHVIVEEHERPNKKLLKRYENLLLGFRWGDALDAALSGEHLETSVLALEELKKRGKVRAALLNRDEDSLEPLFEFATKAIADSRYINIVADYVAVVLDMYTSVITKSPILEERVSEFYDALKSEVETAKESKKIQGMLELLSV

SEQ ID NO: 11264 - DNA, 1572 bp, Cryptococcus neoformans var. neoformans JEC21
  CDS (1)..(1572)
atggagtttctgccgctgcgcaccctcccagcgccgccacgacaacaatcaacaacaaatcctcattccagacactttcactcttttcgacaccccctcttcatcaaacacccggccgccatcacccatatccatttttgcccaacaaaaccacatcggtatgccgtgacatcttccacaagagtgttgatctatgcaccgaagaccggaaaggtggtaaagactatcactaggttcaaggacactgctcgaagcggagagtttaggaaagatggtaaattagtagttgctggtggagacgatggtgttgttcaggtcttcgacgtgaacagtcgagcaatcttaagaacgatgaaagagcataaccaacccgtccgagtcacccatttctccccgcatcttccccaagtgctctccgcttccgacgatactacagtaaagctctgggacttgtccacacaagcatgtctctccaccttttcgtcccacaccgactatgttagatcatcaattttctccccttccgacccttccctgatactctctgcatcttatgattccactattcggctacacgacgtccgactgccagaagacgaggctaatgtcattactatgcgacatggtggtgctcccgtggaggatatcttggcgttccccagtggaggtgtggctgtcagcgtcggtggacctatattgagagtttgggatcttgcaatggcaggcaagtgcgtgcgagcattgtccaatcaccaaaagaccgttacctcagttgcctttgatggtacaaagggacgagtcttgaccggcggtctcgacaacatggtcaaggtctacgacgttgaagactggaaggttgttcacaccatgcgttaccccgcacccgtcttatctctcgcggtttcccctgatgacacccacatcgcagctggtatgactgacggtaccctttccgttcgtcggcgagatcccaaagcttctgagctcggcgcgtcttcagcgcaggaaacagctatcaagggtggcgcatatgaatactttgcagatatggaggcgatcttcgggacagggcacatcaaggctaaggggaaagatttaggacctgtggttgggccggcagacgaatttagggtggagacaagacggcaaaagaggctgagggactttgacaaatatttgaaatcattcaaatactctgccgctcttgacgcaggattacacaagaatgtcaagcccaccactacattcgctttgatccaggagttggttcaccgtgatgctcttcggatagccctttccgggcgagacgatgttacacttgaacctattctcaactttttggccaagaacgtcacagaccctcgattcggtgagatggcggcgcaggtcgtcggtgtcatcattgatatctacacaccaatcctcggccaatcgcctattctcgatgaaatgctcggcaagattcagacacgggttgagagggagttgagtttccagagagagttgatgaagttaagaggggcactggatatgacattgtcacaggccgctttagggagagtcgaggcttag

SEQ ID NO: 11265 - protein, 523 aa, Cryptococcus neoformans var. neoformans JEC21
MEFLPLRTLPAPPRQQSTTNPHSRHFHSFRHPLFIKHPAAITHIHFCPTKPHRYAVTSSTRVLIYAPKTGKVVKTITRFKDTARSGEFRKDGKLVVAGGDDGVVQVFDVNSRAILRTMKEHNQPVRVTHFSPHLPQVLSASDDTTVKLWDLSTQACLSTFSSHTDYVRSSIFSPSDPSLILSASYDSTIRLHDVRLPEDEANVITMRHGGAPVEDILAFPSGGVAVSVGGPILRVWDLAMAGKCVRALSNHQKTVTSVAFDGTKGRVLTGGLDNMVKVYDVEDWKVVHTMRYPAPVLSLAVSPDDTHIAAGMTDGTLSVRRRDPKASELGASSAQETAIKGGAYEYFADMEAIFGTGHIKAKGKDLGPVVGPADEFRVETRRQKRLRDFDKYLKSFKYSAALDAGLHKNVKPTTTFALIQELVHRDALRIALSGRDDVTLEPILNFLAKNVTDPRFGEMAAQVVGVIIDIYTPILGQSPILDEMLGKIQTRVERELSFQRELMKLRGALDMTLSQAALGRVEA

SEQ ID NO: 11266 - DNA, 1626 bp, Aspergillus nidulans FGSC A4
  CDS (1)..(1626)
atggcggcccccgtcctcccgttaacgcaggtcaagctgcccgagctgcccgcatcacaattaagccccgagcagctccactggaagaccttcaaaaatcctctcctcattccatcaccagcaaacggccctgtcaacttcatcacacaaccatctgcgccctcttccgcctctgccttcccctcgctcacacagccccccgatgtcttcaccgtcacaacgggcgcccgcgtgcagatttactctattcgcacacgaaaactgctccgaacgatcactcggttcgatgacactgcgcgcggcacagacgttcgtcctgatggcaggattctagtagcgggtgatgataccggtacattacaggtgttcgatgttggttcgcgagcgattttgaagacgtggaaggaccacaagcagccggtttgggtagccaagttctcgcctagcgatccgacgtgtgttctgtccgcaagcgatgaccggactgtgcggttgtgggatctgcccagtgagaacagtatcaaatcattcgtgggtcactccgactatgtgcgtactgcggcgttcatgccgggttcgctggcttcgtctggctcgttagtgtctggtagttacgatcgaacagtgcggttgtgggatccccgtatggagggccggtctgccatgactttcaagatgggcgcgccgctggaaactgttctccccatgccgacgggcacgacagtgctggccgcggcggacaacaagatcgcggtgttggatatcgtggctggaaagccactgcatatgattcagagccatcaaaagacagtcacatcactctccttagcatcggacggaacgcggttactcagcggtgctctcgatggccaccttaagattcacgaaacaactggctggaatgtcgtggctggcttcaaataccagtcgcccatcctctccctctgcgcaatcacctccggcgctgcacgcgaagacaagcatattgccgttggtatgcagtctggactgctgtcaatcaagacccgtctctctggtcagcagaaggcgcgcgagcgcgagcgcaagaaggaaatggaggcccttcttgagggaaagattgaagagtacgacaagaagaagaacaagaataagaggcgccaaggctccgcgtgggaacgacgatggcgaggtctggattttgtcggtgaaggagtggacatcatcatcgacggtaatgaggcaaagaagcgcaagaaggagaaggggtgggaacttgatctgcgcaaaggccgctacgctactgctctcgaccaggtccttggctcggccgacaggatcgcgcagcttacccttttctcagagctgcggcaccgctctgcgcttcgtgcggccctgcggggtcgtgatgaggtcacgcttcagcccgtgctgcagtgggtgtacaagaacatcacggagccgagactggttggactgagtgtggaggtagcaatgaatgtgttggatatctactctgcgaacctggggcagtcggaacagatcgacaaaatggtagagcggctgcattggcgggtgagggatgaagtggactttgcgcatcaggcgttcgagacgaaggggatgttggatatgctgcgtgcttaa

SEQ ID NO: 11267 - protein, 541 aa, Aspergillus nidulans FGSC A4
MAAPVLPLTQVKLPELPASQLSPEQLHWKTFKNPLLIPSPANGPVNFITQPSAPSSASAFPSLTQPPDVFTVTTGARVQIYSIRTRKLLRTITRFDDTARGTDVRPDGRILVAGDDTGTLQVFDVGSRAILKTWKDHKQPVWVAKFSPSDPTCVLSASDDRTVRLWDLPSENSIKSFVGHSDYVRTAAFMPGSLASSGSLVSGSYDRTVRLWDPRMEGRSAMTFKMGAPLETVLPMPTGTTVLAAADNKIAVLDIVAGKPLHMIQSHQKTVTSLSLASDGTRLLSGALDGHLKIHETTGWNVVAGFKYQSPILSLCAITSGAAREDKHIAVGMQSGLLSIKTRLSGQQKARERERKKEMEALLEGKIEEYDKKKNKNKRRQGSAWERRWRGLDFVGEGVDIIIDGNEAKKRKKEKGWELDLRKGRYATALDQVLGSADRIAQLTLFSELRHRSALRAALRGRDEVTLQPVLQWVYKNITEPRLVGLSVEVAMNVLDIYSANLGQSEQIDKMVERLHWRVRDEVDFAHQAFETKGMLDMLRA

SEQ ID NO: 11268 - DNA, 1629 bp, Aspergillus fumigatus Af293
  CDS (1)..(1629)
atggctgcccccgtcctccccctgcagcaggtcaagctgcctgcgctgccctcaacccgcttgacgccagagcagcagtactggaagaccttcaagaatccgctcctcatcccctctcccgccaacggacccgtcaacctcatcacgcagccgtccgctccgtcatccgcctccgccttcccgtccctcacccagccgcccgacgtcttcaccgtgacgaccggcgcgcgcgtgcagatctactccatccgcacccgcaaactcctccgcacaatcacccgcttcgacgataccgtccgcgggaccgatgtgcggcccgacggccgggtcgtcgtgacaggcgacgacacaggcacagtgcaggtcttcgacgtcgcgtcgcgggcgatcctgaagacgtggaaggaccaccggcagccggtgtgggtgaccaagttctcgccgagcgacccaacctcggtgctgagcgccagcgacgaccggaccgtgcggctgtgggatttgccgagccagagcgccgcgcggacgttcctggggcatacagactacgtgcgtagcggggcgtacatgcctggctcgctggcggcgtcgggcttggtggtctcggggagttatgatcggacggtgaggctgtgggatccccgcgtggagaaccgggcggcgatgacgtttaagatggcggcgccgattgagagtgtgttgccgatgccgacggggacgacgctgctggcgtcggcggagaataaaatcgcggtcctggatattgtggcggggaagccgctgcatatgatccagagtcaccagaagacggtgacggcgctggcgctggcgtcgaatggggagaggttgctgagtggtgcgttggacgggcacatgaaggtgtttgagacgactgggtggaacgttgtgtctgggtccaagtacccctctccgattctatcgctgcgggtgatcacgtctggtgtcgcgcgggaagacaagcacatcgcggtgggcatgcagtcgggcctgttatcgatcaagacccggctgtcgggccagcagaagatccgggagcgggaacgacgcaaggagatgcaggcattgcttgaaggcaagctggaagagcacgaccggaaggtggccaagcagaagaaactgcgcgggtcaggctgggagaagcggctgcgcgggcgggatttcatcggcgaaggcgtggagatcgtgatcgagggccaggacaagaagaagcgcaagaaggagcagacgtgggagtacgacctgcgcaaggcgcggtactcggcggcgctggaccaggtgctggcgtcgagcgacaagacggcgcagctgacgctgttcacggcgctgcggcaccgctccgcgctgcgggccgcgctgcagggccgcgacgaggagacgctgcagccggtgctgcagtgggtgcacaggaacatcacggagccgcggctggtgacgctgtgcgtggaggtcgccatgaacgtgttggacatctactcgggcaatctgggacagtcggcgcagatcgacaagatggtggagcgcctgcatcggcgggtgcgcgaggaggtggaaatggcgcatcaggcgtgtcagaccaaggggatgctggatatgttgcaggccgtatag

SEQ ID NO: 11269 - protein, 542 aa, Aspergillus fumigatus Af293
MAAPVLPLQQVKLPALPSTRLTPEQQYWKTFKNPLLIPSPANGPVNLITQPSAPSSASAFPSLTQPPDVFTVTTGARVQIYSIRTRKLLRTITRFDDTVRGTDVRPDGRVVVTGDDTGTVQVFDVASRAILKTWKDHRQPVWVTKFSPSDPTSVLSASDDRTVRLWDLPSQSAARTFLGHTDYVRSGAYMPGSLAASGLVVSGSYDRTVRLWDPRVENRAAMTFKMAAPIESVLPMPTGTTLLASAENKIAVLDIVAGKPLHMIQSHQKTVTALALASNGERLLSGALDGHMKVFETTGWNVVSGSKYPSPILSLRVITSGVAREDKHIAVGMQSGLLSIKTRLSGQQKIRERERRKEMQALLEGKLEEHDRKVAKQKKLRGSGWEKRLRGRDFIGEGVEIVIEGQDKKKRKKEQTWEYDLRKARYSAALDQVLASSDKTAQLTLFTALRHRSALRAALQGRDEETLQPVLQWVHRNITEPRLVTLCVEVAMNVLDIYSGNLGQSAQIDKMVERLHRRVREEVEMAHQACQTKGMLDMLQAV

SEQ ID NO: 11270 - DNA, 1728 bp, Ustilago maydis 521
  CDS (1)..(1728)
atggagtactcgtcggttcgagcagtggcagagcaatccgctcgcccatcctcctctcgctcacccgagtcaaactactggcgcaagttccgcacccccgtctttgtcaaggaactggcacctatcacttcgattcactttgtaccaccggtctctgtctactcgaccaccgcgctcgatgaggatgtttcctccactggcgctgcctctaccattggctcgacttccactcaacccacttcggtctctgcacgtcaaaagtttgccgtcacaacaggagcacgtgtgcagatctactcgatgcgcaacagccgagtatccaagaccatttctcggttcaaggatgtggcacgatcggccagtttcaggtcggacggtagattgatggtggcaggagacgacagtggcctgatccaggtattcgacacaacatcaagagcgattctgaggacgatgaggggccacagtggcccagttcatgtcacgagattctcgccaaacggaatcgagatcatgtccgctgccgatgacaggacggttcggttgtgggatgtcccagagcagaaggcagttcatgtgtttgagggacacaacgactatgtccgttcggctgttttcagtccggataatccggcactgatgctctcgggcagttatgacagtacagtcaaattgtgggactcgagaatggcagagcagggtggatgtgccatgacgatgaaccacggtgcctcggtggaggatgtgttggtgtatccaacaggaggtggtggtgtagcgctctcggcaggtggggcggtgatgaaggtatgggatctcatgatgggtggcaggtgcatggcgagcatctcgaaccatcaaaagacaatcacctcgcttgcgctttcggtcaactctggtgctgagttttccgtcgacaactcggagtcgatcggtggcatgcgtatcttgacggctggtctcgatcacttggtcaaggtgtacgacccagcacaagactttaaagtgacgcacacgatgcgttacgcttcgccgatcttgtcaatggctgtttcgccggatgaatcacacattgcggtcggtatggcggatggcacgctctgcgttcgcaaacgagatctcaaagccagcgagctggaacgacgtgaagcggaacgagcagccatgaatgccggagcgtatgagttcttcatgcaaggtaaagcggctgcctcgaatcaaccaggtaaaatcaatacacgacgagcgacagacgacatccgcgtagacagcgtgcgcaaacgcaagttgcaagactacgatcgattcctcaaagcgttccgctatagcgatgcgctcgatgcggcgctgcgcaaaggtgtcgcccccagcgtgacgtttggtctgatccttgagctcattcaccgaagtccgcgtggaagcttggatggcctgcgaagggctatttcgaatcgagacgacgtcaccctcgaacctgtcctccgtttcctgcttcggcatgcggcgaacccgagttacgtcgatctggtctgcgacacgctcaacgtgatcgtcgacacgtacgccagcgtcatcggccaaagtccgttgatcgatgatctcttcggtaggatctgggccaaggtcagcgacgaattgaggctgcagcgagatctcatgcaggtcaggggaagcttggagatgattctggcagctaccgcgctaggtgcagcttcggcggttgcgtaa

SEQ ID NO: 11271 - protein, 575 aa, Ustilago maydis 521
MEYSSVRAVAEQSARPSSSRSPESNYWRKFRTPVFVKELAPITSIHFVPPVSVYSTTALDEDVSSTGAASTIGSTSTQPTSVSARQKFAVTTGARVQIYSMRNSRVSKTISRFKDVARSASFRSDGRLMVAGDDSGLIQVFDTTSRAILRTMRGHSGPVHVTRFSPNGIEIMSAADDRTVRLWDVPEQKAVHVFEGHNDYVRSAVFSPDNPALMLSGSYDSTVKLWDSRMAEQGGCAMTMNHGASVEDVLVYPTGGGGVALSAGGAVMKVWDLMMGGRCMASISNHQKTITSLALSVNSGAEFSVDNSESIGGMRILTAGLDHLVKVYDPAQDFKVTHTMRYASPILSMAVSPDESHIAVGMADGTLCVRKRDLKASELERREAERAAMNAGAYEFFMQGKAAASNQPGKINTRRATDDIRVDSVRKRKLQDYDRFLKAFRYSDALDAALRKGVAPSVTFGLILELIHRSPRGSLDGLRRAISNRDDVTLEPVLRFLLRHAANPSYVDLVCDTLNVIVDTYASVIGQSPLIDDLFGRIWAKVSDELRLQRDLMQVRGSLEMILAATALGAASAVA

SEQ ID NO: 11272 - DNA, 1566 bp, Tribolium castaneum
  CDS (1)..(1566)
atgagttccttcaagaaattgaacacaaaaatctaccaaaaaagcgcgtcagtggtcacccctgactatatctactggaagcagcttagtccccctgtcttggtgaaggagtttgggcccatcgactacattgatttttcccccgttgagccctactattttgctgtaacgtgctcagtgcgtgtgcaagtgtacaacccggtcactaaactggtggctaagaatttatcaaggtttagggaaagtgcatatggggctgttttccggtcagatgggcggcttatatgcgccggtggtgaagaagcgagtgtcaagttattcgacgtttcgactaaaagtctcctaaggttgtttaaaggacacagtgctgcggttcataggacttttttcatcgaagggaggccgcaaattgcgtcgttttcggacgacaagagtgtgaaaatttgggacattccgactgagaccaacattgctacgttttcggaccattgtgattatgttagagccggggctacaaatcctcttgttccggacgttgtcctagccggagggtatgacaattttgtaaaaatgtacgatactaggaccaacgagaccattctcaatgtcaatcatggtagtcccgttgagtctcttttgtttctaccaactggtggtatttttctctcagctggtgggactgagattaagatatgggacacagtggctggtggtaaattactggggagtatttcccaacaccacaagaccataacttgtctcagattagcctcggacaacaagcggctgttatcggggagtttagacagacatgtgaaaatttatgacctcagtagttacaaagtggttcacaccttggactaccctaacgctattttaagtctgggggtttcgaaacacgacgaaaccgttgttgtgggtcttgttgacggtttagttgcgataagtcgtagagaggaaggggaaaaaacgaaaaaagtaaaaaaacaaatttctttccaacacaaaacaaacttacacttgccaacagttgatgcaattgtaccgcagtttaaccacgaaaaagaaacaaaatacgataaatgtttgcgtaagtttgaatattccaaagcccttgattgcgttctggtgtcttatgtggcaaataaaacgccccaagtgactgtaagtgtgatgcaagagcttatcaaaagacgcgcattacataaagcttttctcgggcgagacgttaagtcagtgatacaaattttacgatttcttattagaaacataactgaaaatcgctttgctagagtgttaattgatgcggcaaatatttttattgatacttatgaagaaagcccagttattgtaaatccagaagttaggaatttgttggtcagtttgactcgtcttctgagagaagaggccgaaattgccaatgaaatgactgagttgcaaggggctatgcatatgctactatcagcggcgacaatacccacagaaacaaggccagagcaaaatattcaccataacttgttaccgagtaaagaggcccaaaaaaacctcattgtaaatcttacctga

SEQ ID NO: 11273 - protein, 521 aa, Tribolium castaneum
MSSFKKLNTKIYQKSASVVTPDYIYWKQLSPPVLVKEFGPIDYIDFSPVEPYYFAVTCSVRVQVYNPVTKLVAKNLSRFRESAYGAVFRSDGRLICAGGEEASVKLFDVSTKSLLRLFKGHSAAVHRTFFIEGRPQIASFSDDKSVKIWDIPTETNIATFSDHCDYVRAGATNPLVPDVVLAGGYDNFVKMYDTRTNETILNVNHGSPVESLLFLPTGGIFLSAGGTEIKIWDTVAGGKLLGSISQHHKTITCLRLASDNKRLLSGSLDRHVKIYDLSSYKVVHTLDYPNAILSLGVSKHDETVVVGLVDGLVAISRREEGEKTKKVKKQISFQHKTNLHLPTVDAIVPQFNHEKETKYDKCLRKFEYSKALDCVLVSYVANKTPQVTVSVMQELIKRRALHKAFLGRDVKSVIQILRFLIRNITENRFARVLIDAANIFIDTYEESPVIVNPEVRNLLVSLTRLLREEAEIANEMTELQGAMHMLLSAATIPTETRPEQNIHHNLLPSKEAQKNLIVNLT

SEQ ID NO: 11274 - DNA, 1602 bp, Oryza sativa subsp. indica
  CDS (1)..(1602)
atggccgccgacacctccaagcccttcttcccggcggcgccgaaccccgccctcctcccctccggccgcaagccctcccgcctctccccggaggcctcttactggcgctccttccgcgcctccgagctcacccccgccaacgagttcaacgtcacccacctcgccttctccccctcgtcggcccccaccctcgccgcctcgtggtccacctccgtgctcctcttctccggcgacccgctctccccgctcccccgcatccccgcctcccaggacgtcgccttctccccgtccttccgctccgacggctccctcctcgccgtcggcgacaagaagggcgtcgtccgcgtcttccgcgccgacaagaaacagtcgtcgggcgcgctccgcacgctcacggcccacaccgccgagacccgcgtcgtccgctaccccgtcgccggcggcgacaaggtccacctcttcaccgccggcgacgacgcgctcctcgcctactgggacgtgccatccgagacgcccgtgttcgccgcccccgccgcccaccgcgactacatccgcgccggcgccgcgtcccccgccgaccacaacatcttcgccacgggctcgtacgaccgcatcgtcaaattgtgggacgcccgcatggggaagacgtcgacgttgtccttctcccatggcgaattggtggagagcgtgctgttcctgccgtccggcgggctgctggcgacagccggcgggaacgtcgtcaggatttgggatgtcattggtggcgggcggcttctccactcggtggagagccatgtcaagacggtgatggccctcgcgctcgccaagatgactaacaccggcgagacgcggctgcttagcgcggggagtgatggttatgtcaagagctttgattatggcgagcttaagctcacgcactcgatgcgatatcctaaggaattgctttccttggcgtgctcgccgtgtgggacagtgctggttgctggatcttcaaagggcacaatttatatgggtaggaggaaaaagaagtcgacaggggaggacgaggaagagggtaagggtgttggtggtgagcttgattgggcaccaaccaagccggagaagcggcggttggcaccgtccaactataggtacttcctccgtggacaaaatgcgaaggctaaggaaggtgaccttgtgattgagaagcctaagaaggtgaaggttgctgaacacgataagttgctgaggaagttcaggcacaaggatgctctagtttcagcgttagctcgaaacaatccaaggagcatagtggcggtgatggaggagctagtttcaaggagaaagctggtcagatgcatcgagaacttggacacggaagaactcgttcttctcctgctgttcctgcaccgaaatgcaaccttgccaaggtatgccaggttcttgatgggggtggcaaacaaggtgctggagatgcgcgcggaagatatccgatcagatgagaacctaaggggttgtgttagaaatcttaagaggatggctgcagaggagattcagatacagcacacattgcaggggatccaagggatgatttcacccatgcttgcacttgccagtagatga

SEQ ID NO: 11275 - protein, 533 aa, Oryza sativa subsp. indica
MAADTSKPFFPAAPNPALLPSGRKPSRLSPEASYWRSFRASELTPANEFNVTHLAFSPSSAPTLAASWSTSVLLFSGDPLSPLPRIPASQDVAFSPSFRSDGSLLAVGDKKGVVRVFRADKKQSSGALRTLTAHTAETRVVRYPVAGGDKVHLFTAGDDALLAYWDVPSETPVFAAPAAHRDYIRAGAASPADHNIFATGSYDRIVKLWDARMGKTSTLSFSHGELVESVLFLPSGGLLATAGGNVVRIWDVIGGGRLLHSVESHVKTVMALALAKMTNTGETRLLSAGSDGYVKSFDYGELKLTHSMRYPKELLSLACSPCGTVLVAGSSKGTIYMGRRKKKSTGEDEEEGKGVGGELDWAPTKPEKRRLAPSNYRYFLRGQNAKAKEGDLVIEKPKKVKVAEHDKLLRKFRHKDALVSALARNNPRSIVAVMEELVSRRKLVRCIENLDTEELVLLLLFLHRNATLPRYARFLMGVANKVLEMRAEDIRSDENLRGCVRNLKRMAAEEIQIQHTLQGIQGMISPMLALASR

SEQ ID NO: 11276 - DNA, 1557 bp, Oryza sativa subsp. japonica
  CDS (1)..(1557)
atggccgccgacacctccaagcccttcttcccggcggcgccgaaccccgccctcctcccctccggccgcaagccctcccgcctctccccggaggcctcctactggcgctccttccgcgcctccgagctcacccccgccaacgagttcaacgtcacccacctcgccttctccccctcgtcggcccccaccctcgccgcctcgttgtccacctccgtgctcctcttctccggcgacccgctctccccgctcccccgcatccccgcctcccaggacgtcgccttctccccgtccttccgctccgacggctccctcctcgccgtcggcgacaagaagggcgtcgtccgcgtcttccgcgccgacaagaagcagtcgtcgggcgcgctccgcacgctcacggcccacaccgccgagacccgcgtcgtccgctaccccgtcgccggcggcgacaaggtccacctcttcaccgccggcgacgacgcgctcctcgcctactgggacgtgccatccgagacgcccgtgttcgccgcccccgccgcccaccgcgactacatccgcgccggcgccgcgtcccccgccgaccacaacatcttcgccacgggctcgtacgaccgcatcgtcaaattgttgggacgcccgcatggggaagacgtcgacgctgtccttctcccatggcgaattgccggcgggaacgtcgtcaggatttgggatgtcattggtggcgggcggcttctccactcggtggagagccatgtcaagacggtgatggccctcgcgctcgccaagatgaccaacaccggcgagacgcggctgcttagcgcggggagtgatggttatgtcaagagctttgattatggcgagcttaagctcacgcactcgatgcgatatcctaaggaattgctttccttggcgtgctcgccgtgtgggacagtgctggttgctggatcttcaaagggcacaatttatatgggtaggaggaaaaagaagtcgacaggggaggacgaggaagagggtaagggtgttggtggtgagcttgattgggcaccaaccaagccggagaagcggcggttggcaccgtccaactataggtacttcctccgtggacaaaatgcgaaggctaaggaaggtgaccttgtgattgagaagcctaagaaggtgaaggttgctgaacacgataagttgctgaggaagttcaggcacaaggatgctctagtttcagcgttagctcgaaacaatccaaggagcatagtggcggtgatggaggagctagtttcaaggagaaagctggtcagatgcatcgagaacttggacacggaagaactcgttcttctcctgctgttcctgcaccgaaatgcaaccttgccaaggtatgccaggttcttgatgggggtggcaaacaaggtgctggagatgcgcgcggatgatatccgatcagatgagaacctaaggggttgtgttagaaatcttaagaggatggctgcagaggagattcagatacagcacacattgcaggggatccaagggatgatttcacccatgcttgcacttgccagtagatga

SEQ ID NO: 11277 - protein, 518 aa, Oryza sativa subsp. japonica
MAADTSKPFFPAAPNPALLPSGRKPSRLSPEASYWRSFRASELTPANEFNVTHLAFSPSSAPTLAASLSTSVLLFSGDPLSPLPRIPASQDVAFSPSFRSDGSLLAVGDKKGVVRVFRADKKQSSGALRTLTAHTAETRVVRYPVAGGDKVHLFTAGDDALLAYWDVPSETPVFAAPAAHRDYIRAGAASPADHNIFATGSYDRIVKLLGRPHGEDVDAVLLPWRIAGGNVVRIWDVIGGGRLLHSVESHVKTVMALALAKMTNTGETRLLSAGSDGYVKSFDYGELKLTHSMRYPKELLSLACSPCGTVLVAGSSKGTIYMGRRKKKSTGEDEEEGKGVGGELDWAPTKPEKRRLAPSNYRYFLRGQNAKAKEGDLVIEKPKKVKVAEHDKLLRKFRHKDALVSALARNNPRSIVAVMEELVSRRKLVRCIENLDTEELVLLLLFLHRNATLPRYARFLMGVANKVLEMRADDIRSDENLRGCVRNLKRMAAEEIQIQHTLQGIQGMISPMLALASR

SEQ ID NO: 11278 - DNA, 1713 bp, Vitis vinifera
  CDS (1)..(1713)
  misc_feature (1614)..(1614): r is g or a
atggcggaacctcaacaagcactctccaggaccttcccagtgaagcctaaactcaaagcaaaatccaaaaaaccctcaaaaaccccagaatccaagtactggtcgtccttcaaatctcacaccattcccaatctcatctcttccataacctctttatcattctctccggcgacccctcaccacttcgccgccgcctactccacctccctcaccctcttcaactccaaaactctcgaacccatctcctccatctcctccttcaaagacgtcgtttcatgcgcctccttccgctccgatggcctcctcatcgccgcctctgaccactccggccttgtccaggtcttcgacgtcaagacccgaacagctcttcgaaagctccgcggtcacactcggccggttcgactcgttcggtacccgcgttccgataagctccacttgttctccgggggcgacgatgcagtggtcaagtactgggatgttgctgccgagtcaggagttgtggagttccggggccacaaggattatgtccgctgcggagatgggtcaccggcgagttctgagttgtttgccacggggtcgtatgatcatacggttaaggtttgggatgttagagtttcgaattcggatgcagcgatgaagataaatcatgggaaaccggtggaagatgtgatcttcttgccgtccggtgggttaattgcaaccgccggaggaaattgtgtgaagatttgggatgtgattggaggagggaagttgttgtattcaatggagaatcataacaagactgttacctcaatttgtgtgggtaagattgggagggatggtggtgagggttcagaacaatatagggttttgagcgtgggcctggatgggtatatgaaggtttttgattactctaagttcaagataactcattcgatgaggttcccagcaccgcttttatcaattgggttctcgcctgattgtgcaacgcgggcaattggtacttcaaatggggttatatatgctgggaagaggaaggtgaagggggaagttgagagtggcttgagggagtttccaagtttgggtttgatggaggaaccacagaggcgggtactgaggccctcttattttcgatatttccataggagccaaggagagaaaccttctgagggggattacctcattacaaggccaaagaaagtgaaaatcgcagagcatgataagttgttgaagaagtttaggcataaggatgcttttgtgtctgccttaagtgggaagaaccctgaaaatgtggtggctgtgatggaggaattggtagcaaggaagaagttgttgaaatgtgtttcgaatttggatacagaggagcttgggttacttctggcattcttgcataggcattcaactgtgccaagatatgcaggtttgttaatggggttgacaaagaaagtggttcagatgcgagctgaagacattatagcttctgatgtcttgaagggccatataagaaacctgaagcggtcagttgaggaggaggttaggatacaacaatccttgcaagagatacaaggaaggtcttggtctatgacaagtgatattagacccaaagttatgaaggaatttgtaactaatgaagaraggaagccaacaagtttgtatggcttcaaaatagataagaaagctcttaacgagctacctcctaatagaaaattttgtgccattggaaatgggaagtga

SEQ ID NO: 11279 - protein, 570 aa, Vitis vinifera
MAEPQQALSRTFPVKPKLKAKSKKPSKTPESKYWSSFKSHTIPNLISSITSLSFSPATPHHFAAAYSTSLTLFNSKTLEPISSISSFKDVVSCASFRSDGLLIAASDHSGLVQVFDVKTRTALRKLRGHTRPVRLVRYPRSDKLHLFSGGDDAVVKYWDVAAESGVVEFRGHKDYVRCGDGSPASSELFATGSYDHTVKVWDVRVSNSDAAMKINHGKPVEDVIFLPSGGLIATAGGNCVKIWDVIGGGKLLYSMENHNKTVTSICVGKIGRDGGEGSEQYRVLSVGLDGYMKVFDYSKFKITHSMRFPAPLLSIGFSPDCATRAIGTSNGVIYAGKRKVKGEVESGLREFPSLGLMEEPQRRVLRPSYFRYFHRSQGEKPSEGDYLITRPKKVKIAEHDKLLKKFRHKDAFVSALSGKNPENVVAVMEELVARKKLLKCVSNLDTEELGLLLAFLHRHSTVPRYAGLLMGLTKKVVQMRAEDIIASDVLKGHIRNLKRSVEEEVRIQQSLQEIQGRSWSMTSDIRPKVMKEFVTNEERKPTSLYGFKIDKKALNELPPNRKFCAIGNGK

SEQ ID NO: 11280 - DNA, 1629 bp, Vitis vinifera
  CDS (1)..(1629)
atgaatggtatatttataatttttctgggtggaggtgcttcaatggcggaacctcaacaagcactctccaggaccttcccagtgaagcctaaactcaaagcaaaatccaaaaaaccctcaaaaaccccagaatccaagtactggtcgtccttcaaatctcacaccattcccaatctcatctcttccataacctctttatcattctctccggcgacccctcaccacttcgccgccgcctactccacctccctcaccctcttcaactccaaaactctcgaacccatctcctccatctcctccttcaaagacgtcgtttcatgcgcctccttccgctccgatggcctcctcatcgccgcctctgaccactccggccttgtccaggtcttcgacgtcaagacccgaacagctcttcgaaagctccgcggtcacactcggccggttcgactcgttcggtacccgcgttccgataagctccacttgttctccgggggcgacgatgcagtggtcaagtactgggatgttgctgccgagtcaggagttgtggagttccggggccacaaggattatgtccgctgcggagatgggtcaccggcgagttctgagttgtttgccacggggtcgtatgatcatacggttaaggtttgggatgttagagtttcgaattcggatgcagcgatgaagataaatcatgggaaaccggtggaagatgtgatcttcttgccgtccggtgggttaattgcaaccgccggaggaaattgtgtgaagatttgggatgtgattggaggagggaagttgttgtattcaatggagaatcataacaagactgttacctcaatttgtgtgggtaagattgggagggatggtggtgagggttcagaacaatatagggttttgagcgtgggcctggatgggtatatgaaggtttttgattactctaagttcaagataactcattcgatgaggttcccagcaccgcttttatcaattgggttctcgcctgattgtgcaacgcgggcaattggtacttcaaatggggttatatatgctgggaagaggaaggtgaagggggaagttgagagtggcttgagggagtttccaagtttgggtttgatggaggaaccacagaggcgggtactgaggccctcttattttcgatatttccataggagccaaggagagaaaccttctgagggggattacctcattacaaggccaaagaaagtgaaaatcgcagagcatgataagttgttgaagaagtttaggcataaggatgcttttgtgtctgccttaagtgggaagaaccctgaaaatgtggtggctgtgatggaggaattggtagcaaggaagaagttgttgaaatgtgtttcgaatttggatacagaggagcttgggttacttctggcattcttgcataggcattcaactgtgccaagatatgcaggtttgttaatggggttgacaaagaaagtggttcagatgcgagctgaagacattatagcttctgatgtcttgaagggccatataagaaacctgaagcggtcagttgaggaggaggttaggatacaacaatccttgcaagagatacaaggtataatttctcctttactgaggattgctggaagaagataa

SEQ ID NO: 11281 - protein, 542 aa, Vitis vinifera
MNGIFIIFLGGGASMAEPQQALSRTFPVKPKLKAKSKKPSKTPESKYWSSFKSHTIPNLISSITSLSFSPATPHHFAAAYSTSLTLFNSKTLEPISSISSFKDVVSCASFRSDGLLIAASDHSGLVQVFDVKTRTALRKLRGHTRPVRLVRYPRSDKLHLFSGGDDAVVKYWDVAAESGVVEFRGHKDYVRCGDGSPASSELFATGSYDHTVKVWDVRVSNSDAAMKINHGKPVEDVIFLPSGGLIATAGGNCVKIWDVIGGGKLLYSMENHNKTVTSICVGKIGRDGGEGSEQYRVLSVGLDGYMKVFDYSKFKITHSMRFPAPLLSIGFSPDCATRAIGTSNGVIYAGKRKVKGEVESGLREFPSLGLMEEPQRRVLRPSYFRYFHRSQGEKPSEGDYLITRPKKVKIAEHDKLLKKFRHKDAFVSALSGKNPENVVAVMEELVARKKLLKCVSNLDTEELGLLLAFLHRHSTVPRYAGLLMGLTKKVVQMRAEDIIASDVLKGHIRNLKRSVEEEVRIQQSLQEIQGIISPLLRIAGRR

SEQ ID NO: 11282 - DNA, 1629 bp, Aspergillus fumigatus (strain CEA10 / CBS 144.89 / FGSC A1163)
  CDS (1)..(1629)
atggctgcccccgtcctccccctgcagcaggtcaagctgcctgcgctgccctcaacccgcttgacgccagagcagcagtactggaagaccttcaagaatccgctcctcatcccctctcccgccaacggacccgtcaacctcatcacgcagccgtccgctccgtcatccgcctccgccttcccgtccctcacccagccgcccgacgtcttcaccgtgacgaccggcgcgcgcgtgcagatctactccatccgcacccgcaaactcctccgcacaatcacccgcttcgacgataccgtccgcgggaccgatgtgcggcccgacggccgggtcgtcgtggcaggcgacgacacaggcacagtgcaggtcttcgacgtcgcgtcgcgggcgatcctgaagacgtggaaggaccaccggcagccggtgtgggtgaccaagttctcgccgagcgatccaacctcggtgctgagcgccagcgacgaccggaccgtgcggctgtgggatttgccgagccagagcgccgcgcggacgttcctggggcatacagactacgtgcgtagcggggcgtacatgcctggctcgctggcggcgtcgggcttggtggtctcggggagttatgatcggacggtgaggctgtgggatccccgcgtggagaaccgggcggcgatgacgtttaagatggcggcgccgattgagagtgtgttgccgatgccgacggggacgacgctgctggcgtcggcggagaataaaatcgcggtcctggatattgtggcggggaagccgctgcatatgatccagagtcaccagaagacggtgacggcgctggcgctggcgtcgaatggggagaggttgctgagtggtgcgttggacgggcacatgaaggtgtttgagacgactgggtggaacgttgtgtctgggtccaagtacccctctccgattctatcgctgcgggtgatcacgtctggtgtcgcgcgggaagacaagcacatcgcggtgggcatgcagtcgggcctgttatcgatcaagacccggctgtcgggccagcagaagatccgggagcgggaacgacgcaaggagatgcaggcattgcttgaaggcaagctggaagagcacgaccggaaggtggccaagcagaagaaactgcgcgggtcaggctgggagaagcggctgcgcgggcgggatttcatcggcgaaggcgtggagatcgtgatcgagggccaggacaagaagaagcgcaagaaggagcagacgtgggagtacgacctgcgcaaggcgcggtactcggcggcgctggaccaggtgctggcgtcgagcgacaagacggcgcagctgacgctgttcacggcgctgcggcaccgctccgcgctgcgggccgcgctgcagggccgcgacgaggagacgctgcagccggtgctgcagtgggtgcacaggaacatcacggagccgcggctggtgacgctgtgcgtggaggtcgccatgaacgtgttggacatctactcgggcaatctgggacagtcggcgcagatcgacaagatggtggagcgcctgcatcggcgggtgcgcgaggaggtggaaatggcgcatcaggcgtgtcagaccaaggggatgctggatatgttgcaggccgtatag

SEQ ID NO: 11283 - protein, 542 aa, Aspergillus fumigatus (strain CEA10 / CBS 144.89 / FGSC A1163)
MAAPVLPLQQVKLPALPSTRLTPEQQYWKTFKNPLLIPSPANGPVNLITQPSAPSSASAFPSLTQPPDVFTVTTGARVQIYSIRTRKLLRTITRFDDTVRGTDVRPDGRVVVAGDDTGTVQVFDVASRAILKTWKDHRQPVWVTKFSPSDPTSVLSASDDRTVRLWDLPSQSAARTFLGHTDYVRSGAYMPGSLAASGLVVSGSYDRTVRLWDPRVENRAAMTFKMAAPIESVLPMPTGTTLLASAENKIAVLDIVAGKPLHMIQSHQKTVTALALASNGERLLSGALDGHMKVFETTGWNVVSGSKYPSPILSLRVITSGVAREDKHIAVGMQSGLLSIKTRLSGQQKIRERERRKEMQALLEGKLEEHDRKVAKQKKLRGSGWEKRLRGRDFIGEGVEIVIEGQDKKKRKKEQTWEYDLRKARYSAALDQVLASSDKTAQLTLFTALRHRSALRAALQGRDEETLQPVLQWVHRNITEPRLVTLCVEVAMNVLDIYSGNLGQSAQIDKMVERLHRRVREEVEMAHQACQTKGMLDMLQAV

SEQ ID NO: 11284 - DNA, 1542 bp, Saccharomyces cerevisiae (strain AWRI1631)
  CDS (1)..(1542)
atgtcgactgctaggcctagaataatcacttcgaaggctccattattgcctcaacagactaccccggagcagcgttactggcgtcaatacacttccgcacaactggttaaagaacataatagcgttactcacatatcattcaatcctcaacatcctcatgattttgcagtaacttcctcaaccagagttcaaatattttcttcaagaactaggcaagtgatcaagaccttttcaagatttaaagatgttgtctattctgcatcctttaggagtgatggtaaattgctttgtgccggtgatgctaccggtttagtgtctgtatacgacagttataatcccaggactatccttttatctataaacgcttccacacatcccacacatgttacgaaattccatacgcaagacaacaaaattctggctacggcgagtgacgatagagtgacaagactttgggatatatccaacgcatatgagccacaattagagctcaccggagccactgactatgttcgtaccttatcatttatcccagcagccccacatttggttgcaacaggctcatacgatggtttgatcagattatatgacacaagatctagcggatccacgccaatttattctctgaatcatgaccaacctgttgaaaatgttattgcagtatctccaacccaaattgtttcttgcggtggcaataatttcaaagtgtgggacttgaccagtaacaagaaattatacgaacgtggcaatttcaataaggctgtgacatgcttggactatgttgaaaattttgattctccaatgcaatcggcgttgatcgcttcttccttagatggtcatgtcaaagtctttgatcctttagacaatttccaagtcaaatttggctggaaattttcgggtcccgtactaagttgtgctgtctcccctagtaccgcacaagggaataggcatttagtagcaggtttatcatcaggactactagccattagaactaaaaagaaagagaaacgttcttccgataaagaaaacgcacccgccagttttaataagaatgcgaaaagtaataacttccagagaatgatgcgaggctcggaataccaaggtgatcaagagcatataatccacaatgataaggtaagatctcaacgtcgtatgcgtgcattcgaaaggaacataaatcagtttaaatggagcgaagcactcgacaatgcctttgtaccaggtatggccaaagagttgacacttactgttcttcaagaactacgcaaacgtggcaaagttcgtgtagcgctatatgctagagatgaatctacattagagccgctactgaattggtgcttaaaaggtattgaagatgtgagatcagcatctattgtagcggattgggtcgccgtggttttagaattatatgggaatacgttagaaagctctccagttcttcaagaattgatgatagatttgaaaactaaagttagacatgaaattcataagtctaaagaagctcaaagaattgaaggtatgcttcaacttttaacgagttaa

SEQ ID NO: 11285 - protein, 513 aa, Saccharomyces cerevisiae (strain AWRI1631)
MSTARPRIITSKAPLLPQQTTPEQRYWRQYTSAQLVKEHNSVTHISFNPQHPHDFAVTSSTRVQIFSSRTRQVIKTFSRFKDVVYSASFRSDGKLLCAGDATGLVSVYDSYNPRTILLSINASTHPTHVTKFHTQDNKILATASDDRVTRLWDISNAYEPQLELTGATDYVRTLSFIPAAPHLVATGSYDGLIRLYDTRSSGSTPIYSLNHDQPVENVIAVSPTQIVSCGGNNFKVWDLTSNKKLYERGNFNKAVTCLDYVENFDSPMQSALIASSLDGHVKVFDPLDNFQVKFGWKFSGPVLSCAVSPSTAQGNRHLVAGLSSGLLAIRTKKKEKRSSDKENAPASFNKNAKSNNFQRMMRGSEYQGDQEHIIHNDKVRSQRRMRAFERNINQFKWSEALDNAFVPGMAKELTLTVLQELRKRGKVRVALYARDESTLEPLLNWCLKGIEDVRSASIVADWVAVVLELYGNTLESSPVLQELMIDLKTKVRHEIHKSKEAQRIEGMLQLLTS

SEQ ID NO: 11286 - DNA, 1578 bp, Ricinus communis
  CDS (1)..(1578)
atggaaaaccaaaactcaatcttcccaataaaaccaaaactaaaacccaaatcgagaactccttcaaaatctccagaatccaaatactggtcttccttcaaatccactcaaatccctaacttgatctcttcaataccttcaattgcctactctccaattccctcttctcacctcttcgccgccgcaaattccgcttctctcactcttttctcctctcaaacattcgctcccacatcctccatctcatccttctccgacgtcgtttcctcctgctctttccgctccgatggctccctcattgccgcctccgatctttctgggctcgttcaggtcttcgatgtcaaaagccggaacccacttcgtcgtcttaagtcacatgcccgtcctgttaggtttgttaaatacccatttcttgataagcttcatttagtgtctggtggtgatgatgctattgttaaatattgggatgttgctagtgaaactgtggttcttgatttgttgggtcataaagattatgttaggtgtggtgattgttctccaattgacggcgaggtttttgttactgggtcttatgatcattgtgttaaattatgggatgttagagttgagagtaaaagatcagttcttgaaatgaatcatggcaagcctattgaggatgtcatgtttttgccttctggtggaatgcttgttactgctggaggtaatagtgtaaagatttgggatttgattggtggaggaaagatggttcattctgttgagagtcataataagacggttatgtctgtctgtgtagggaagataatggaagatgagggaatgcagtatagaattatgagtgttggtttagatgggtatatgaaggtttttgattatgctaaaatgaaaattacccattcaatgaggtttcctgctccccttatgtcaattggggtttcacctgattgtatgtctagggcaattggaacttcgaatgggattatatttggtgggagaaggaaggtgaaggaaaatgaggaacagggtggaagagggtttggggattttatgggtttagggagtattggggagccgcagagacgggttttgaggcctactaattttaggtactttcataggagtcaaggagagaagccaaatgaaggtgattatttgatattgagacccaagaaggtgaaattggctgagcatgataagttgttgaaaaaatttaggcacaaagaagcttttgtttcggttctgagtgggaagaatccagaatatgtggtggctgtgatggaggagttggtggctaggaggaaattgatcaagtgtgtgtcaaatctggatgaagaagagcttggattgttgttgggtttcttgcataagtactcaactatgccaagacattccggtctgttaatggggttaacgagaaaagtgcttgatatgagggctgatgatattaaagcttctgatgcattgaagggtcatattagaaatctgaagcgttcagtcgaagaagagatcagaatacaccacgcacttcaggagattcaaggaattatttctccactattgaggattgctgggagaagatag

SEQ ID NO: 11287 - protein, 525 aa, Ricinus communis
MENQNSIFPIKPKLKPKSRTPSKSPESKYWSSFKSTQIPNLISSIPSIAYSPIPSSHLFAAANSASLTLFSSQTFAPTSSISSFSDVVSSCSFRSDGSLIAASDLSGLVQVFDVKSRNPLRRLKSHARPVRFVKYPFLDKLHLVSGGDDAIVKYWDVASETVVLDLLGHKDYVRCGDCSPIDGEVFVTGSYDHCVKLWDVRVESKRSVLEMNHGKPIEDVMFLPSGGMLVTAGGNSVKIWDLIGGGKMVHSVESHNKTVMSVCVGKIMEDEGMQYRIMSVGLDGYMKVFDYAKMKITHSMRFPAPLMSIGVSPDCMSRAIGTSNGIIFGGRRKVKENEEQGGRGFGDFMGLGSIGEPQRRVLRPTNFRYFHRSQGEKPNEGDYLILRPKKVKLAEHDKLLKKFRHKEAFVSVLSGKNPEYVVAVMEELVARRKLIKCVSNLDEEELGLLLGFLHKYSTMPRHSGLLMGLTRKVLDMRADDIKASDALKGHIRNLKRSVEEEIRIHHALQEIQGIISPLLRIAGRR

SEQ ID NO: 11288 - DNA, 1575 bp, Micromonas pusilla CCMP1545
  CDS (1)..(1575)
atgggggagtacagaaagctccagccgaagaagttcgagccgcggtcgatacgcgagaccgcggaggggcggtattggcgcgcgtacaagtccccggcgctcctggaccaaatctcacaggtgacgtccgtggcgttcgcggacgtctacccgtacgcgctcgcggtgacgtcgtccgcgcgcgtgacggtgtacaactcgcagaaccgcagggcgttgcggacgttcgcgcgattcaaagacgtcgcgtacggcggcgtcctgcgaggcgacgcgaaagcgctcgcggtgggagggcaagcggggatggtacagctgttcgacatgagcagccggtccatcctgcggaaattcacgcaacacgcgcgggcggttcgcgcggtgcgattctccacgcagacgcacgccatcatgggatccgcgtcggacgacacgacggtgaggatatgggacatcgccgcgggagtgtgcagcaggcggcacgacgggcacacggactacgcgcggtccatcgcgtcgcatccaatctcgatcgatcgatgggcgactgggtcgtacgatcacacggtgaaactgtgggatgatcgcgacgggtcgatgaaacactcgttgagcctgaaccacggcgcgcccgtggaggacatctcgtggcttccgggggggaacctcctcgtcagcgtcggcggccaggacgtctgcgtgtgggacgtcctctcgggcgggaagttgttacggaagctgaggtgtcaccagaagacgatcatgtgctgccacgtggcgcccgacggcggtccgccgcgcgcgaccgcgccgcggttgctgaccggcagcctggacggccacgtcaaggtgcacgagttggacgatttcaccgtgacgcacgcggccaagtaccccggcccggtgttgtccgtggcgctgtccccggacgcgaacgtcctcgcggtgggatgcgcgaacaagctcctgtcgattcgaaggaggaaagttccgagggaggcggcgtacgggctcggcggcgtcggcgggcgcgtcggcgtcggcggcgggaagaagagaggcccgcgtcgactggacgccgggagttggcagtacttcgttcgcggcacgaacgagaaagccgcggaggggcagatggtgatcgcgcgacggaagcggatacgcctgaaaccgtacgacaaggctctccggcggttccgcgtcggcgaggcgttggacgccgcgctcgcgacgggccgccccgaggtgattgccgccgtcgtggaggagatcggcgccagaggcgggacgcgcgcggcgttgtccaaccgcgacgaggcgagactcggcccggtgctgcggttcatcgcgcggcagatcgcgaacccgcggcacacgcggcagctcgtgggcgtcgcggggaaggttttggacgtatacggcggcgaggttggcgtgtcgcccgcggtggacggcgcgttgcgattgattcgcgaacgcgtcgcggggacgctgaagcttcaggacgcgttggcgaatctgagcgggatcgccgcgccgctgttggccgcggggcatcacgcggcgtacgggtag

SEQ ID NO: 11289 - protein, 524 aa, Micromonas pusilla CCMP1545
MGEYRKLQPKKFEPRSIRETAEGRYWRAYKSPALLDQISQVTSVAFADVYPYALAVTSSARVTVYNSQNRRALRTFARFKDVAYGGVLRGDAKALAVGGQAGMVQLFDMSSRSILRKFTQHARAVRAVRFSTQTHAIMGSASDDTTVRIWDIAAGVCSRRHDGHTDYARSIASHPISIDRWATGSYDHTVKLWDDRDGSMKHSLSLNHGAPVEDISWLPGGNLLVSVGGQDVCVWDVLSGGKLLRKLRCHQKTIMCCHVAPDGGPPRATAPRLLTGSLDGHVKVHELDDFTVTHAAKYPGPVLSVALSPDANVLAVGCANKLLSIRRRKVPREAAYGLGGVGGRVGVGGGKKRGPRRLDAGSWQYFVRGTNEKAAEGQMVIARRKRIRLKPYDKALRRFRVGEALDAALATGRPEVIAAVVEEIGARGGTRAALSNRDEARLGPVLRFIARQIANPRHTRQLVGVAGKVLDVYGGEVGVSPAVDGALRLIRERVAGTLKLQDALANLSGIAAPLLAAGHHAAYG

SEQ ID NO: 11290 - DNA, 1608 bp, Drosophila melanogaster
  CDS (1)..(1608)
atgcagaactcctttcttccactgaacacacggcgttttcgacagcgggcccaggtggaaacgccggatacggtgtactgggaccgactggcgaaaccagaactactcaaggagcacaacaccatcgattatttggacttcagtccaagcgatcctgacaactttgttgtgacctgttcggtgcgcgttcagatttacaacctggtgaccatgcttgtggtaaagaacctttcccgattccaaaagaccgcatacggcgccaccttccggcaggatggtcgactcctggccgccggcgacgaggagggccatgtcaagctattcgacaccaccagtcgcaacatcttgcgtttgttcaagggacacacggcaccagtacaccgcaccttctttacggcggacaagctgcagctagccagttttggagacgacaagtcggtccgtctgtgggacgtggcaaacgagaaggtggtgcaaacgtacgaggacacgcacaccgactacgttcgtgcaggcgccatgcatccgcaggcagggcatatgttcgtctccggcggctacgatggcaagatcaaactgtacgatacgagagcggaaacggcggtgcagcgcaccttagatcacggagctccggtggagtccatgttgttccttccgaacggctctattttcgtcagcgccggcggcagccaggtgcgcgtatgggatctcatcagcggctgtcgtctgctcaccatgatgtcgcagcatcacaaaacagtaacttgtctgcgactaggatccgatggcaggagattgctctcaggcggtctcgataggcacgtgaaaatctacgatgtgagcacctacaaaacagtgcacacattgacttatcccaatgcggtggtcagcatggctgtcgctgacggagatcaagcagttgtggctggaatggtcgatggtctagtctccattcgtcgcatgatggtagacagcaagcccagtcatttgaaaaagattcgtgcggatcgcgctcgaaagtacttcgtgagtacgaaacgcacgaacaacacccaagaggttgatcacaccatcaaggaccacgtcaaggggcctggattgaaatcctacgatgtgcacttgcgccagtttaaccacaagaaggctttggacgacgtgatgaatgcgcagaagatgcaataccagccggagctcattgtggctgtcatcacggaccttctgcaccgtggatcactgggaaaagccctcacgggtcgtcatgaggcagcgcttgtccgattcatcgacttcatttgcaaccacttgggcgaggtgcgattcatgcgcccgctgatgatggccgcgagcacggtccttgatgtcttcgagcaacgattggtggcctacagccagaagctgatgaaagccttgcaacgattgtcacttgcaatgcaggaggaggtgaggctcaccgccgagctgatgcggatgaagggttctgtggatatgctcattgggatttcaatggacaatagcgaggtagcccataagcccacctatgtggagacaaagacacctaagatgcatccctccgtggcggcgcaaaattatgtggtcttagttgagtga

SEQ ID NO: 11291 - protein, 535 aa, Drosophila melanogaster
MQNSFLPLNTRRFRQRAQVETPDTVYWDRLAKPELLKEHNTIDYLDFSPSDPDNFVVTCSVRVQIYNLVTMLVVKNLSRFQKTAYGATFRQDGRLLAAGDEEGHVKLFDTTSRNILRLFKGHTAPVHRTFFTADKLQLASFGDDKSVRLWDVANEKVVQTYEDTHTDYVRAGAMHPQAGHMFVSGGYDGKIKLYDTRAETAVQRTLDHGAPVESMLFLPNGSIFVSAGGSQVRVWDLISGCRLLTMMSQHHKTVTCLRLGSDGRRLLSGGLDRHVKIYDVSTYKTVHTLTYPNAVVSMAVADGDQAVVAGMVDGLVSIRRMMVDSKPSHLKKIRADRARKYFVSTKRTNNTQEVDHTIKDHVKGPGLKSYDVHLRQFNHKKALDDVMNAQKMQYQPELIVAVITDLLHRGSLGKALTGRHEAALVRFIDFICNHLGEVRFMRPLMMAASTVLDVFEQRLVAYSQKLMKALQRLSLAMQEEVRLTAELMRMKGSVDMLIGISMDNSEVAHKPTYVETKTPKMHPSVAAQNYVVLVE

SEQ ID NO: 11292 - DNA, 1653 bp, Ostreococcus tauri
  CDS (1)..(1653)
atggacgtccgagatcacggcgcgcgcggtgacgccggaggttttctccatcaaggattgggggagtaccgaaagctgccgacgaaaaaatacccggcgctcgagcgacgggagacggcggagtggcgatactggaggaatttcgcgagcacgacgttgagtgaacaggtgaacgcggtgacgagcgtgtcgtacggtggaatggagagtggaagagcgacgctggcgacgacgagcggagcgcgggtgacgctgcacgcgccgagcggagcgaggaaattgcgaacgttcgcgaggtttaaggacgtggcgtacagtggggtgttgcgagatgatggtcgagcgctcgcggtgggtgggcagcaaggggtggtgcagttgttcgattgcggctcgcgggcggtgctgcggaagttttcggcgcacgtcgccgccgttcgagcggtgcgatggagcggagataagctccatctcgcctcggcgagcgacgacgcgacggtgcgattatgggatatttctaccgggaactgcgttcgaaggcacgacgggcacaaggattacgtgcgagcgttggagcggagtccggcgtctggggaaatttgggcgagcgggtcgtacgatcacgctgtaaagctctgggacgctcgagcgggacgagaagcggtgatgacgttcgatcacaaggttccggtagaagacatcgcgtggtatccgaacgggaacttgctcgtgtccgtgggtggcgaggacgtgtgcgtctgggacgtcctcggtggtggacgactcctccaacgactgcgaagtcaccagaaaaccatcaccaccgtgcacgtgcacgacgacgcgggtccgccgtcatttgcgtctggttttgagatgaccggtaacagcgccatcgatgcaaaggctccgcgcatgatcaccggctctctagatggtttcgtgaagattcacgagctcgacaccttcacggtgacgcactcgataaagtacccgggaccggtgctctcgtgttcgctctcaccggacgcgaactgcctcgcgacggggttggcgaacaaagttttaagcgtgcgacgtcgaaagacgccgcgcaataaggatgaatcttccggttaccaaggcgttcggagcaagaagaagggatacacagtcaagaagccgaggcgactagacgccgggcactggcgatacttcattcgtggacagaactccaagaccgcggcaaatgcgacgcgtgtgcttcgacagcgccgtattcatctggccgcgcacgatcgaatgcttaaacagttcagatacggagacgccctggacgcggcgctgcacatgagacgctcagaggtcatcgccgccgtcatcgaagaagtaggtagacgcggcggtctacaaaaggcgctagcgaaccgcgacgacgaatcactgctcccaattctagagtacatcgagaagaatatcgccaagcctcgtcacaccgcgcagatggtgaacatcgccaaccgaatcattgatatttacggcagcgacgtcggcgcaagcgcaacggttgataacagccttcgacgcattcaggaaaaggttaagacacaacttcgccttcatgagtcgctgaggcagttgcagggcatggctctcatgatcaccggggcgtga

SEQ ID NO: 11293 - protein, 550 aa, Ostreococcus tauri
MDVRDHGARGDAGGFLHQGLGEYRKLPTKKYPALERRETAEWRYWRNFASTTLSEQVNAVTSVSYGGMESGRATLATTSGARVTLHAPSGARKLRTFARFKDVAYSGVLRDDGRALAVGGQQGVVQLFDCGSRAVLRKFSAHVAAVRAVRWSGDKLHLASASDDATVRLWDISTGNCVRRHDGHKDYVRALERSPASGEIWASGSYDHAVKLWDARAGREAVMTFDHKVPVEDIAWYPNGNLLVSVGGEDVCVWDVLGGGRLLQRLRSHQKTITTVHVHDDAGPPSFASGFEMTGNSAIDAKAPRMITGSLDGFVKIHELDTFTVTHSIKYPGPVLSCSLSPDANCLATGLANKVLSVRRRKTPRNKDESSGYQGVRSKKKGYTVKKPRRLDAGHWRYFIRGQNSKTAANATRVLRQRRIHLAAHDRMLKQFRYGDALDAALHMRRSEVIAAVIEEVGRRGGLQKALANRDDESLLPILEYIEKNIAKPRHTAQMVNIANRIIDIYGSDVGASATVDNSLRRIQEKVKTQLRLHESLRQLQGMALMITGA

SEQ ID NO: 11294 - DNA, 1593 bp, Arabidopsis thaliana
  CDS (1)..(1593)
atggaggaagagcttcgtgttcggctgaatgaccatcaagtgtcaaaggttttccctgtgaagcccaaatcaacggcgaaacctgtttccgaatcggagactccggaatcgaggtactggtcctccttcaaaaatcattccacacctaatctcgtctcctccgtagccgctttggctttctctccggtccaccctcactccttggccgtcgctcactccgccaccgtctccctcttttcctcgcagtcgctttcctcctcccgccgtttctccttccgcgatgttgtctcctccgtctgtttccgttccgacggagctcttttcgcggcatgcgatctctccggtgtggtccaggtcttcgacatcaaggaacgaatggctctccgtactctccgctcccacagcgcccccgctcgattcgtcaagtatccagttcaggacaagctccacttggtctccggaggcgacgatggagtcgtcaagtactgggatgtcgccggagcaacagtcatctcagatctgctaggccacaaggattatgtccgctgcggtgattgctcgtccgtcaacgattcaatgttggtaacaggctcttacgatcacacggtgaaggtgtgggacgccagagtccacacgtccaattggattgccgagatcaaccacggactcccagtggaggacgtcgtatacctgccttccggtggattgatcgcaaccgctggtggcaacagcgtcaaggtatgggatttgatcggaggcgggaagatggtttgctccatggagagtcacaacaagaccgtcacgtctctccgcgttgcgagaatggaatcggctgagagtcgacttgtgagcgttgctttggacggatacatgaaagtcttcgattacgggagagcaaaggtgacttactctatgaggtttcctgctcctctcatgtctcttggcctttcccccgatggttccactcgggtaatcggagggtctaatggcatggtgtttgccggtaagaagaaggtgagagatgttgttggaggacagaagaaaagtttgaatctctggagtctgataagcgatgtggatgagagtaggagaagggcactgaggcctacgtatttcaggtacttccagagagggcagagcgaggagccatccaaagatgattacttggtcaaggagaagaaaggattgaagctgacgagacacgataagctcttgaagaagttcaggcataaggaagctctggtctcggtgttggaggagaagaaaccggccaatgttgtggcagtgatggaagaattagtggcgaggaggaagctgatgaagtgcgtgtcgaatatggaggaaggcgagttgggaatgctgctaggcttcttacaaaggtactgcactgtgcagaggtattcaggattgttgatgggattgacgaagaaggttttggagacgagagctgaagacatcaagggtaaaaacgagtttaaagggcttctcaggaacttgaagagggaggttaatcaggagattaggatacaacagtctcttctagagattcagggtgttattgctcctttgatgagaattgcgggtagaagttga

SEQ ID NO: 11295 - protein, 530 aa, Arabidopsis thaliana
MEEELRVRLNDHQVSKVFPVKPKSTAKPVSESETPESRYWSSFKNHSTPNLVSSVAALAFSPVHPHSLAVAHSATVSLFSSQSLSSSRRFSFRDVVSSVCFRSDGALFAACDLSGVVQVFDIKERMALRTLRSHSAPARFVKYPVQDKLHLVSGGDDGVVKYWDVAGATVISDLLGHKDYVRCGDCSSVNDSMLVTGSYDHTVKVWDARVHTSNWIAEINHGLPVEDVVYLPSGGLIATAGGNSVKVWDLIGGGKMVCSMESHNKTVTSLRVARMESAESRLVSVALDGYMKVFDYGRAKVTYSMRFPAPLMSLGLSPDGSTRVIGGSNGMVFAGKKKVRDVVGGQKKSLNLWSLISDVDESRRRALRPTYFRYFQRGQSEEPSKDDYLVKEKKGLKLTRHDKLLKKFRHKEALVSVLEEKKPANVVAVMEELVARRKLMKCVSNMEEGELGMLLGFLQRYCTVQRYSGLLMGLTKKVLETRAEDIKGKNEFKGLLRNLKREVNQEIRIQQSLLEIQGVIAPLMRIAGRS

SEQ ID NO: 11296 - DNA, 1614 bp, Zea mays
  CDS (1)..(1614)
atggccgctgacacttcgaagcccttcttccccgcggcgccgcactcggctctccgcccctccaggagcgccgcctcgcgcgcgttccctgagagctcctactggcgcgccttccgctcctcggagctcgtgtccgacgccggcttccccgtcaccgatctcaccttcgcctcctctgtggaagacagagctgcccctaccctcgccgcttcctggtccacctccgtgcacgtcttctcctccgaccccctcgagaagctccgtaggatctctgtcgcgggcgatctcgccttctccccgtccttccgctgcgacggcgccctcctcgccaccggagacaagaagggtgtcgtccgcgtattccgcgccgacaaggccgccacgggggccctccgcacgctgcgcgcccacgccgccgagacccgcgtggtccggtacccagtcgctggcggcgacaagcttcacctcctcaccgccggcgacgacgcgctcctcgcctactgggacgtgccctcggagactcccgtcttctccatccccgccgcgcaccaggactacattcgcggcggtgcggcctcccctgctgatcacaacattttcgccactggctcttacgaccgcagcgtcaaattgtgggatgcccgcaccagcaataccggcccatctttgtccttctcccacggggaattggtggaaagcgtgctattccttccgtccggcgggctgctggccacggccggagggaacgtggtcaagatttgggacgtcattggtggtggccggctcgtgcactctgtggagagccatgtcaagacagtgatggacctgactcttggcaagatggtcaacactggggagatgcggctgcttagtgcgggcattgatgggtatgtgaagagctttgattttgggaagcttaagatgacacactccttgcggtaccctcagccgctcctttctgtggctgtctcgccctgtgggtctgtggtggtggcagggtctgcgaaagggaagatttatatgagaaataggaagaagaaggctgtggatgaggaagagcaagggatgaaatctgttggtggtgagattgactgggtatctccagagccggagaagtcagtgttgaggccaaattactttaggtacttccgccgtgggcagaatgagaaggcaaaggagggtgactttgtgattgagaagccgaagaaggtgaaatatgcagagcatgataagttactgagaaagttcaggcacaaggatgctctggtttcagcattggtcaagaacaacccgaggagtgttgtggctgttatggaggagctggtttcaagaagaaagctcataagatgcatcgggaatttggataatgaggaacttggtcttcttttggagttccttcaccggaatgcaactttgccaaggtatgctaagttgttgttgtgtttggcaaacaaggttgtggagatgcgcgaggctgatatccgatcagatgagaagctgaaggtgcatatgaggaatcttaagagaatggttgcagaggagattcagatacagcacatgctgcagggcattcaagggatgatttcaccaatgcttgcacttgcaaccagatga

SEQ ID NO: 11297 - protein, 537 aa, Zea mays
MAADTSKPFFPAAPHSALRPSRSAASRAFPESSYWRAFRSSELVSDAGFPVTDLTFASSVEDRAAPTLAASWSTSVHVFSSDPLEKLRRISVAGDLAFSPSFRCDGALLATGDKKGVVRVFRADKAATGALRTLRAHAAETRVVRYPVAGGDKLHLLTAGDDALLAYWDVPSETPVFSIPAAHQDYIRGGAASPADHNIFATGSYDRSVKLWDARTSNTGPSLSFSHGELVESVLFLPSGGLLATAGGNVVKIWDVIGGGRLVHSVESHVKTVMDLTLGKMVNTGEMRLLSAGIDGYVKSFDFGKLKMTHSLRYPQPLLSVAVSPCGSVVVAGSAKGKIYMRNRKKKAVDEEEQGMKSVGGEIDWVSPEPEKSVLRPNYFRYFRRGQNEKAKEGDFVIEKPKKVKYAEHDKLLRKFRHKDALVSALVKNNPRSVVAVMEELVSRRKLIRCIGNLDNEELGLLLEFLHRNATLPRYAKLLLCLANKVVEMREADIRSDEKLKVHMRNLKRMVAEEIQIQHMLQGIQGMISPMLALATR

SEQ ID NO: 11298 - DNA, 1614 bp, Zea mays
  CDS (1)..(1614)
atggccgctgacacttcgaagcccttcttcccggcggcgccgcactcggctctccgcccctccaggagcgccgcctcgcgcgcgttccctgagagctcctactggcgcgccttccgctcctcggagctcgtgtccgacgccggcttccccgtcaccgatctcaccttcgcctcctctgtggaagacagagctgcccctaccctcgccgcttcctggtccacctccgtgcacgtcttctcctccgaccccctcgagaagctccgtaggatctctgtcgcgggcgatctcgccttctccccgtccttccgctgcgacggcgccctcctcgccaccggagacaagaagggtgtcgtccgcgtattccgcgccgacaaggccgccacgggggccctccgcacgctgcgcgcccacgccgccgagacccgcgtggtccggtacccagtcgctggcggcgacaagcttcacctcctcaccgccggcgacgacgcgctcctcgcctactgggacgtgccctcggagactcccgtcttctccatccccgccgcgcaccaggactacattcgcggcggtgcggcctcccctgctgatcacaacattttcgccactggctcttacgaccgcagcgtcaaattgtgggatgcccgcaccagcaataccggcccatctttgtccttctcccacggggaattggtggaaagcgtgctattccttccgtccggcgggctgctggccacggccggagggaacgtggtcaagatttgggacgtcattggtggtggccggctcgtgcactctgtggagagccatgtcaagacagtgatggacctgactcttggcaagatggtcaacactggggagatgcggctgcttagtgcgggcattgatgggtatgtgaagagctttgattttgggaagcttaagatgacacactccttgcggtaccctcagccgctcctttctgtggctgtctcgccctgtgggtctgtggtggtggcagggtctgcgaaagggaagatttatatgagaaataggaagaagaaggctgtggatgaggaagagcaagggatgaaatctgttggtggtgagattgactgggtatctccagagccggagaagtcagtgttgaggccaaattactttaggtacttccgccgtgggcagaatgagaaggcaaaggagggtgactttgtgattgagaagccgaagaaggtgaaatatgcagagcatgataagttactgagaaagttcaggcacaaggatgctctggtttcagcattggtcaagaacaacccgaggagtgttgtggctgttatggaggagctggtttcaagaagaaagctcataagatgcatcaggaatttggataatgaggaacttggtcttcttttggagttccttcaccggaatgcaactttgccaaggtatgctaagttgttgttgtgtttggcaaacaaggttgtggagatgcgcgaggctgatatccgatcagatgagaagctgaaggtgcatatgaggaatcttaagagaatggttgcagaggagattcagatacagcacatgctgcagggcattcaagggatgatttcaccaatgcttgcactcgcaaccagatga

SEQ ID NO: 11299 - protein, 537 aa, Zea mays
MAADTSKPFFPAAPHSALRPSRSAASRAFPESSYWRAFRSSELVSDAGFPVTDLTFASSVEDRAAPTLAASWSTSVHVFSSDPLEKLRRISVAGDLAFSPSFRCDGALLATGDKKGVVRVFRADKAATGALRTLRAHAAETRVVRYPVAGGDKLHLLTAGDDALLAYWDVPSETPVFSIPAAHQDYIRGGAASPADHNIFATGSYDRSVKLWDARTSNTGPSLSFSHGELVESVLFLPSGGLLATAGGNVVKIWDVIGGGRLVHSVESHVKTVMDLTLGKMVNTGEMRLLSAGIDGYVKSFDFGKLKMTHSLRYPQPLLSVAVSPCGSVVVAGSAKGKIYMRNRKKKAVDEEEQGMKSVGGEIDWVSPEPEKSVLRPNYFRYFRRGQNEKAKEGDFVIEKPKKVKYAEHDKLLRKFRHKDALVSALVKNNPRSVVAVMEELVSRRKLIRCIRNLDNEELGLLLEFLHRNATLPRYAKLLLCLANKVVEMREADIRSDEKLKVHMRNLKRMVAEEIQIQHMLQGIQGMISPMLALATR

SEQ ID NO: 11300 - DNA, 22 bp, Artificial sequence
  primer
atggcagaccttcttgtagaac

SEQ ID NO: 11301 - DNA, 20 bp, Artificial sequence
  primer
ctatcttctcccggcaattc

SEQ ID NO: 11302 - protein, 608 aa, Artificial sequence
  consensus sequence
  Variant (3)..(15): Xaa in position 3 to 15 is any amino acid
  Variant (16)..(24): Xaa in position 16 to 24 is any or no amino acid
  Variant (26)..(63): Xaa in position 26 to 63 is any amino acid
  Variant (64)..(100): Xaa in position 64 to 100 is any or no amino acid
  Variant (102)..(102): Xaa in position 102 is any amino acid
  Variant (105)..(108): Xaa in position 105 to 108 is any amino acid
  Variant (111)..(113): Xaa in position 111 to 113 is any amino acid
  Variant (115)..(118): Xaa in position 115 to 118 is any amino acid
  Variant (121)..(122): Xaa in position 121 to 122 is any amino acid
  Variant (123)..(126): Xaa in position 123 to 126 is any or no amino acid
  Variant (128)..(129): Xaa in position 128 to 129 is any amino acid
  Variant (131)..(135): Xaa in position 131 to 135 is any amino acid
  Variant (137)..(138): Xaa in position 137 to 138 is any amino acid
  Variant (140)..(155): Xaa in position 140 to 155 is any amino acid
  Variant (156)..(159): Xaa in position 156 to 159 is any or no amino acid
  Variant (162)..(163): Xaa in position 162 to 163 is any amino acid
  Variant (165)..(166): Xaa in position 165 to 166 is any amino acid
  Variant (169)..(180): Xaa in position 169 to 180 is any amino acid
  Variant (181)..(184): Xaa in position 181 to 184 is any or no amino acid
  Variant (186)..(186): Xaa in position 186 is any amino acid
  Variant (189)..(189): Xaa in position 189 is any amino acid
  Variant (191)..(195): Xaa in position 191 to 195 is any amino acid
  Variant (197)..(202): Xaa in position 197 to 202 is any amino acid
  Variant (203)..(209): Xaa in position 203 to 209 is any or no amino acid
  Variant (211)..(211): Xaa in position 211 is any amino acid
  Variant (214)..(219): Xaa in position 214 to 219 is any amino acid
  Variant (221)..(221): Xaa in position 221 is any amino acid
  Variant (223)..(223): Xaa in position 223 is any amino acid
  Variant (224)..(240): Xaa in position 224 to 240 is any or no amino acid
  Variant (242)..(244): Xaa in position 242 to 244 is any amino acid
  Variant (245)..(249): Xaa in position 245 to 249 is any or no amino acid
  Variant (252)..(256): Xaa in position 252 to 256 is any amino acid
  Variant (258)..(258): Xaa in position 258 is any amino acid
  Variant (260)..(264): Xaa in position 260 to 264 is any amino acid
  Variant (265)..(268): Xaa in position 265 to 268 is any or no amino acid
  Variant (270)..(272): Xaa in position 270 to 272 is any amino acid
  Variant (273)..(276): Xaa in position 273 to 276 is any or no amino acid
  Variant (278)..(280): Xaa in position 278 to 280 is any amino acid
  Variant (282)..(289): Xaa in position 282 to 289 is any amino acid
  Variant (290)..(292): Xaa in position 290 to 292 is any or no amino acid
  Variant (294)..(294): Xaa in position 294 is any amino acid
  Variant (297)..(297): Xaa in position 297 is any amino acid
  Variant (299)..(299): Xaa in position 299 is any amino acid
  Variant (301)..(307): Xaa in position 301 to 307 is any amino acid
  Variant (308)..(328): Xaa in position 308 to 328 is any or no amino acid
  Variant (330)..(334): Xaa in position 330 to 334 is any amino acid
  Variant (337)..(339): Xaa in position 337 to 339 is any amino acid
  Variant (341)..(360): Xaa in position 341 to 360 is any amino acid
  Variant (361)..(363): Xaa in position 361 to 363 is any or no amino acid
  Variant (365)..(376): Xaa in position 365 to 376 is any amino acid
  Variant (377)..(383): Xaa in position 377 to 383 is any or no amino acid
  Variant (385)..(387): Xaa in position 385 to 387 is any amino acid
  Variant (389)..(438): Xaa in position 389 to 438 is any amino acid
  Variant (439)..(477): Xaa in position 439 to 477 is any or no amino acid
  Variant (479)..(485): Xaa in position 479 to 485 is any amino acid
  Variant (488)..(505): Xaa in position 488 to 505 is any amino acid
  Variant (506)..(514): Xaa in position 506 to 514 is any or no amino acid
  Variant (516)..(517): Xaa in position 516 to 517 is any amino acid
  Variant (519)..(532): Xaa in position 519 to 532 is any amino acid
  Variant (533)..(538): Xaa in position 533 to 538 is any or no amino acid
  Variant (540)..(553): Xaa in position 540 to 553 is any amino acid
  Variant (555)..(586): Xaa in position 555 to 586 is any amino acid
  Variant (587)..(588): Xaa in position 587 to 588 is any or no amino acid
  Variant (590)..(595): Xaa in position 590 to 595 is any amino acid
  Variant (597)..(607): Xaa in position 597 to 607 is any amino acid
YWXXXXXXXXXXXXXXXXXXXXXXFXXXXXXXXXXXXXXXXXXXXXXXXXXXXXXXXXXXXXXXXXXXXXXXXXXXXXXXXXXXXXXXXXXXXXXXXXXXRXDGXXXXAGXXXGXXXXFDXXXXXXRXXLXXXXXHXXPXXXXXXXXXXXXXXXXXXXXDDXXVXXWDXXXXXXXXXXXXXXXXHXDYXRXXXXXPXXXXXXXXXXXXXGXYDXXXXXXDXRXXXXXXXXXXXXXXXXXXHXXXXXXXXVEXXXXXPXGXXXXXXXXXGXXXXXXXDXXXGXXXXXXXXXXXHXKTXTXLXXXXXXXXXXXXXXXXXXXXXXXXXXXXRXXXXXLDXXXKXXXXXXXXXXXXXXXXXXXXXXXSXXXXXXXXXXXXXXXXXXXGXXXGXXXXXXXXXXXXXXXXXXXXXXXXXXXXXXXXXXXXXXXXXXXXXXXXXXXXXXXXXXXXXXXXXXXXXXXXXXXXXXXXXXXXXXXXXLXXXXXXXALXXXXXXXXXXXXXXXXXXXXXXXXXXXLXXRXXXXXXXXXXXXXXXXXXXXLXXXXXXXXXXXXXXRXXXXXXXXXXXXXXXXXXXXXXXXXXXXXXXXXXLXXXXXXEXXXXXXXXXXXG

SEQ ID NO: 11303 - protein, 30 aa, Artificial sequence
  protein pattern
  Variant (2)..(2): Xaa in position 2 is any amino acid
  Variant (3)..(3): Xaa in position 3 is Asp, Glu or Lys
  Variant (4)..(4): Xaa in position 4 is any amino acid
  Variant (5)..(5): Xaa in position 5 is Ala or Val
  Variant (6)..(6): Xaa in position 6 is any amino acid
  Variant (7)..(7): Xaa in position 7 is Ala, Cys, Gly or Ser
  Variant (8)..(10): Xaa in position 8 to 10 is any amino acid
  Variant (12)..(12): Xaa in position 12 is any amino acid
  Variant (15)..(16): Xaa in position 15 to 16 is any amino acid
  Variant (17)..(17): Xaa in position 17 is Phe, Ile, Leu, Met or Val
  Variant (18)..(18): Xaa in position 18 is any amino acid
  Variant (19)..(19): Xaa in position 19 is Ala, Thr or Val
  Variant (20)..(20): Xaa in position 20 is Ala, Cys, Gly or Ser
  Variant (21)..(21): Xaa in position 21 is Ala, Asp, Gly or Ser
  Variant (22)..(25): Xaa in position 22 to 25 is any amino acid
  Variant (26)..(26): Xaa in position 26 is Ile, Leu or Val
  Variant (27)..(27): Xaa in position 27 is any amino acid
  Variant (28)..(28): Xaa in position 28 is Ile, Leu or Val
  Variant (29)..(29): Xaa in position 29 is Phe or Tyr
  Variant (30)..(30): Xaa in position 30 is Asp, Glu or His
FXXXXXXXXXRXDGXXXXXXXXXXXXXXXX

SEQ ID NO: 11304 - protein, 13 aa, Artificial sequence
  protein pattern
  Variant (2)..(2): Xaa in position 2 is Gly or Ser
  Variant (5)..(6): Xaa in position 5 to 6 is any amino acid
  Variant (7)..(7): Xaa in position 7 is Ile or Val
  Variant (8)..(8): Xaa in position 8 is any amino acid
  Variant (9)..(9): Xaa in position 9 is Leu, Met or Val
  Variant (10)..(10): Xaa in position 10 is Trp or Tyr
  Variant (12)..(12): Xaa in position 12 is any amino acid
GXYDXXXXXXDXR

SEQ ID NO: 11305 - DNA, 882 bp, Populus trichocarpa
  CDS (1)..(882)
atggcgattgcttcagatacccaaccccaagagaaggccagtactgaggtatcaggagaagagaagaagagatggacgctaaatgattttgatataggaaagccacttggacgtggaaagttcggtcatgtttacttagccagagaaaaaaggagcaatcatattgtggctttgaaggttctgtttaagagtcagttgcagcaatcacaggttgaacatcagctccgtcgcgaagttgaaatccaaagtcatcttaggcatcccaatatattgcgcctttatggttacttttacgatcagaaacgagtttatttgatattagaatatgcagccaaaggtgaactctacaaagaattgcaaaagtgtaaatacttcagcgaaagacgtgctgctacttatgttgcgtcattagcccgggcactgatttattgtcacggcaagcatgtaatacacagagacatcaagccagagaacctgttaataggtgcacagggtgagctcaagattgcagattttggttggtcagtgcacacttttaaccgcaggcagacaatgtgtggtacattggactacctcccaccagagatggtggaaagtgtagagcatgatgcgagtgttgatatatggagcctgggtgttttgtgctatgaatttttatatggtgttcctccatttgaggccaaggaacactcagacacatacagaaggattgtgcaagtggatctaaagttccctccaaaaccaattgtctcttctgcagcaaaggaccttattagtcagatgcttgtaaaggattctgcagagcgcctaccgttacataagctacttgatcatccctggattgttcaaaatgctgatccctctggcatctttaggggttga

SEQ ID NO: 11306 - protein, 293 aa, Populus trichocarpa
MAIASDTQPQEKASTEVSGEEKKRWTLNDFDIGKPLGRGKFGHVYLAREKRSNHIVALKVLFKSQLQQSQVEHQLRREVEIQSHLRHPNILRLYGYFYDQKRVYLILEYAAKGELYKELQKCKYFSERRAATYVASLARALIYCHGKHVIHRDIKPENLLIGAQGELKIADFGWSVHTFNRRQTMCGTLDYLPPEMVESVEHDASVDIWSLGVLCYEFLYGVPPFEAKEHSDTYRRIVQVDLKFPPKPIVSSAAKDLISQMLVKDSAERLPLHKLLDHPWIVQNADPSGIFRG

SEQ ID NO: 11307 - DNA, 888 bp, Oryza sativa
  CDS (1)..(888)
atgtggctagggttcgtgtgttcgatccgtcatgtcgaggggtttatggcttcgccgcattcgcaggaggtgaagcggtgggtgttgtctgattttgacatcgggaagcccctcgggaggggcaagttcggccatgtttacttagcaagagaaaagagaagtaaccatattgtggctttgaaagtacttttcaagagccaactaaagcagtcccaggtggagcatcagctacgtcgggaagttgagattcagagtcatcttcgtcatcccaacattctacggctgtatgggtatttctatgatcagacccgtgtgtacttgatcttggagtatgccttaaaaggtgaactttataaggagttgcagaggtgcaagcatttctctgaaagacgttcagcgacttacattgcatcactggcgcatgcgctcatctaccttcacggaaagcatgtgatccatagagacattaaacctgaaaatcttttaattgggtcccagggcgaactgaaaattgcagactttggttggtctgtgcacaccttcaacagaagaaggacaatgtgtggaacattagattacctgccccctgaaatggtggagaagactgaacatgactaccatgttgacatttggagcttggggatcctgtgctatgagttcctttatggagtcccacctttcgaagcaaaagaacactccgaaacatatcgcaggattgtgaaagttgacttgaagttcccactgaaaccattcgtgtccccggctgcgaaagacctaatttcacagatgctcgtgaagaattcggcgcatcgtctgcccctccacaagctcctcgagcacccttggatagttcaaaacgctgatccctccggcgtgtacagaggctag

SEQ ID NO: 11308 - protein, 295 aa, Oryza sativa
MWLGFVCSIRHVEGFMASPHSQEVKRWVLSDFDIGKPLGRGKFGHVYLAREKRSNHIVALKVLFKSQLKQSQVEHQLRREVEIQSHLRHPNILRLYGYFYDQTRVYLILEYALKGELYKELQRCKHFSERRSATYIASLAHALIYLHGKHVIHRDIKPENLLIGSQGELKIADFGWSVHTFNRRRTMCGTLDYLPPEMVEKTEHDYHVDIWSLGILCYEFLYGVPPFEAKEHSETYRRIVKVDLKFPLKPFVSPAAKDLISQMLVKNSAHRLPLHKLLEHPWIVQNADPSGVYRG

SEQ ID NO: 11309 - DNA, 879 bp, Oryza sativa
  CDS (1)..(879)
atggcgatcgccaccgagtcgcgctgcgaggaggagaaggcttcgccgcattcgcaggaggtgaagcggtgggtgttgtctgattttgacatcgggaagcccctcgggaggggcaagttcggccatgtttacttagcaagagaaaagagaagtaaccatattgtggctttgaaagtacttttcaagagccaactaaagcagtcccaggtggagcatcagctacgtcgggaagttgagattcagagtcatcttcgtcatcccaacattctacggctgtatgggtatttctatgatcagacccgtgtgtacttgatcttggagtatgccttaaaaggtgaactttataaggagttgcagaggtgcaagcatttctctgaaagacgttcagcgacttacattgcatcactggcgcatgcgctcatctaccttcacggaaagcatgtgatccatagagacattaaacctgaaaatcttttaattgggtcccagggcgaactgaaaattgcagactttggttggtctgtgcacaccttcaacagaagaaggacaatgtgtggaacattagattacctgccccctgaaatggtggagaagactgaacatgactaccatgttgacatttggagcttggggatcctgtgctatgagttcctttatggagtcccacctttcgaagcaaaagaacactccgaaacatatcgcaggattgtgaaagttgacttgaagttcccactgaaaccattcgtgtccccggctgcgaaagacctaatttcacagatgctcgtgaagaattcggcgcatcgtctgcccctccacaagctcctcgagcacccttggatagttcaaaacgctgatccctccggcgtgtacagaggctag

SEQ ID NO: 11310 - protein, 292 aa, Oryza sativa
MAIATESRCEEEKASPHSQEVKRWVLSDFDIGKPLGRGKFGHVYLAREKRSNHIVALKVLFKSQLKQSQVEHQLRREVEIQSHLRHPNILRLYGYFYDQTRVYLILEYALKGELYKELQRCKHFSERRSATYIASLAHALIYLHGKHVIHRDIKPENLLIGSQGELKIADFGWSVHTFNRRRTMCGTLDYLPPEMVEKTEHDYHVDIWSLGILCYEFLYGVPPFEAKEHSETYRRIVKVDLKFPLKPFVSPAAKDLISQMLVKNSAHRLPLHKLLEHPWIVQNADPSGVYRG

SEQ ID NO: 11311 - DNA, 930 bp, Oryza sativa
  CDS (1)..(930)
atggagaagccggagtggagcatggacgacttcgagatcggcaagtacatcggcgagggcaagttcgggaaggtctacctcgcccgcgagaagcagagcggctacgtggtggcgctcaaggtgacattcaaggcgaagctggacaagtacaggttccacgcgcacctgcggcgggagatcgagatccagcacggcctcgaccaccccaacgtgctccgtctcttcgcctggttccacgacgccgagcgcgtcgtcctcgtgctcgagtacgccgcccgtggggagctttacaagctcctccgcaccgtccgccgcttctctgagcgcaccgctgctacttatgttgccagccttgccggtgcactagcatactgtcataagaagcaagttatccatcgggacatcaagccagagaatttactccttgatattgagggccgacttaaaattgcagattttggatgggcggttagatcaaatgctaaacgacacacactttgtggtacaattgattacctggcacctgaaatgatagagaaaaaggctcatgaccatgctgttgacaactggactttaggaatcttgtgctatgagttcttatatgggtcaccaccttttgaagcagcagaacaggatgatacattgaggaggatagttaaagtggatttgtcgttcccctcaactccttatgtttctgcagatgctaaggatctcatttgcaaggtaaaatttgtggtattgattatacctattgtatatgttacactaaaatgggttgaacttttgagttttgagcttcgagttcgtatgcagcttttggtgaaggattcaaacaagagactttctcttgatgacataatgaaacatccatggattgtgaagaatgcagacccatcagggagttgtagtgaccaaaaggctcgcacataa

SEQ ID NO: 11312 - protein, 309 aa, Oryza sativa
MEKPEWSMDDFEIGKYIGEGKFGKVYLAREKQSGYVVALKVTFKAKLDKYRFHAHLRREIEIQHGLDHPNVLRLFAWFHDAERVVLVLEYAARGELYKLLRTVRRFSERTAATYVASLAGALAYCHKKQVIHRDIKPENLLLDIEGRLKIADFGWAVRSNAKRHTLCGTIDYLAPEMIEKKAHDHAVDNWTLGILCYEFLYGSPPFEAAEQDDTLRRIVKVDLSFPSTPYVSADAKDLICKVKFVVLIIPIVYVTLKWVELLSFELRVRMQLLVKDSNKRLSLDDIMKHPWIVKNADPSGSCSDQKART

SEQ ID NO: 11313 - DNA, 840 bp, Oryza sativa
  CDS (1)..(840)
atggagaagccggagtggagcatggacgacttcgagatcggcaagtacatcggcgagggcaagttcgggaaggtctacctcgcccgcgagaagcagagcggctacgtggtggcgctcaaggtgacattcaaggcgaagctggacaagtacaggttccacgcgcacctgcggcgggagatcgagatccagcacggcctcgaccaccccaacgtgctccgtctcttcgcctggttccacgacgccgagcgcgtcgtcctcgtgctcgagtacgccgcccgtggggagctttacaagctcctccgcaccgtccgccgcttctctgagcgcaccgctgctacttatgttgccagccttgccggtgcactagcatactgtcataagaagcaagttatccatcgggacatcaagccagagaatttactccttgatattgagggccgacttaaaattgcagattttggatgggcggttagatcaaatgctaaacgacacacactttgtggtacaattgattacctggcacctgaaatgatagagaaaaaggctcatgaccatgctgttgacaactggactttaggaatcttgtgctatgagttcttatatgggtcaccaccttttgaagcagcagaacaggatgatacattgaggaggatagttaaagtggatttgtcgttcccctcaactccttatgtttctgcagatgctaaggatctcatttgcaagcttttggtgaaggattcaaacaagagactttctcttgatgacataatgaaacatccatggattgtgaagaatgcagacccatcagggagttgtagtgaccaaaaggctcgcacataa

SEQ ID NO: 11314 - protein, 279 aa, Oryza sativa
MEKPEWSMDDFEIGKYIGEGKFGKVYLAREKQSGYVVALKVTFKAKLDKYRFHAHLRREIEIQHGLDHPNVLRLFAWFHDAERVVLVLEYAARGELYKLLRTVRRFSERTAATYVASLAGALAYCHKKQVIHRDIKPENLLLDIEGRLKIADFGWAVRSNAKRHTLCGTIDYLAPEMIEKKAHDHAVDNWTLGILCYEFLYGSPPFEAAEQDDTLRRIVKVDLSFPSTPYVSADAKDLICKLLVKDSNKRLSLDDIMKHPWIVKNADPSGSCSDQKART

SEQ ID NO: 11315 - DNA, 897 bp, Glycine max
  CDS (1)..(897)
atggccatcgcaacagagactcaacctcaacctcagcaacacaaggattcttcggaggtttcgggttcagctgcggagcaacgaaggtggacgctaaacgatttcgatatcggaaagcctctcggaaggggaaaattcggtcacgtttatttggccagggagaagactagtaatcatattgttgctttgaaagtactcttcaagagccaattgcaacaatcccaagttgtgcatcaacttcgacgtgaagttgaaatacaaagtcatctccgacatccccacatcttgcgcctctatggatacttttatgaccagaaacgagtttatttgattttagagtatgcacccaaaggtgaactttacaaggaattgcaaaaatgcaaatatttcagtgaaaggcgtgcagctacttatgttgcatcattggcccgagcccttatatattgccatggaaagcatgtaatacatagggacattaaaccagagaacctgcttattggtgcacagggtgagttgaaaatagcagactttgggtggtcagtgcacacattcaatcgcaggcggaccatgtgtggcacactggattaccttcctcctgagatggtggagagtgtggaacatgatgcgagtgtggatatatggagccttggtgtcttgtgctatgagtttctttacggagtccctccttttgaggctaaagaacattctgatacttacaggaggataatacaagtggatctgaagttccctcctaaaccaatcgtgtcctcagctgcaaaggatctcattagtcagatgctggtcaaggattcctctcagcgtctaccattgcacaaactccttgaacacccttggattgttcagaatgccgagccctccggtgtatataggagctag

SEQ ID NO: 11316 - protein, 298 aa, Glycine max
MAIATETQPQPQQHKDSSEVSGSAAEQRRWTLNDFDIGKPLGRGKFGHVYLAREKTSNHIVALKVLFKSQLQQSQVVHQLRREVEIQSHLRHPHILRLYGYFYDQKRVYLILEYAPKGELYKELQKCKYFSERRAATYVASLARALIYCHGKHVIHRDIKPENLLIGAQGELKIADFGWSVHTFNRRRTMCGTLDYLPPEMVESVEHDASVDIWSLGVLCYEFLYGVPPFEAKEHSDTYRRIIQVDLKFPPKPIVSSAAKDLISQMLVKDSSQRLPLHKLLEHPWIVQNAEPSGVYRS

SEQ ID NO: 11317 - DNA, 891 bp, Glycine max
  CDS (1)..(891)
atggccatcgcaacagagactcagcctcaacaacacaaggattcttcggaggtttcgggttcagctgcggagcaaagaaggtggacgcttaacgatttcgatatcggaaagcctcttggaaggggaaaattcggtcacgtctatttggccagagagaagactagtaatcatattgttgctttgaaagtactcttcaagagtcaattgcaacaatcccaagttgtgcatcaacttcgacgtgaagttgaaatacagagtcatctccgacatccccacattttgcgcctctatggatacttttatgatcagaaacgagtttatttgattttagagtatgcacccaaaggtgaactttacaaggaattgcaaaaatgcaaatatttcagtgaaaggcgtgcagctacttatgttgcatcattggcccgagcccttatatattgccatggaaagcatgtaatacatagggatattaaaccagagaaccttcttattggttcacagggtgagttgaaaatagcagactttgggtggtcagtgcacacattcaatcgcaggcggaccatgtgtggcacactggattaccttcctcctgagatggtggagagtgtagaacatgatgcgagtgtggatatatggagccttggtgtcttgtgctatgagtttctttatggagtccctccttttgaggctaaagaacattctgatacttacaggaggataatacaagtggatctgaagttccctcctaaaccaattgtgtcttcagctgcaaaggatctcattagtcagatgctggtcaaggattcctctcaacgtctaccattgcacaaactcctcgaacacccttggattgttcagaatgccgagccctctggtgtatataggagctag

SEQ ID NO: 11318 - protein, 296 aa, Glycine max
MAIATETQPQQHKDSSEVSGSAAEQRRWTLNDFDIGKPLGRGKFGHVYLAREKTSNHIVALKVLFKSQLQQSQVVHQLRREVEIQSHLRHPHILRLYGYFYDQKRVYLILEYAPKGELYKELQKCKYFSERRAATYVASLARALIYCHGKHVIHRDIKPENLLIGSQGELKIADFGWSVHTFNRRRTMCGTLDYLPPEMVESVEHDASVDIWSLGVLCYEFLYGVPPFEAKEHSDTYRRIIQVDLKFPPKPIVSSAAKDLISQMLVKDSSQRLPLHKLLEHPWIVQNAEPSGVYRS

SEQ ID NO: 11319 - DNA, 849 bp, Glycine max
  CDS (1)..(849)
atggcttcccaaaacccagcggaggaagaaaattcaaagcgacattggtcccttgaagacttcgagatcggaaaacctctcggtaggggcaaattcggtagagtttacgtcgccagagaagttaagagcaaatttgttgtggcgttgaaggttatatttaaggaacaaattgataagtacagagttcatcaccaactgaggagagagatggagatacagaccagtctccggcacgcaaacatcctgcgtctttacggttggtttcatgatgctgaccgtgttttcttgattcttgagtatgctcataagggagagctttacaaggagctgagaaaaaagggtcatctcactgagaagcaagctgccacgtatattttgagcctcacaaaggcgttggcatattgtcatgagaaacatgttattcatagggatatcaagccagaaaatttgttgcttgaccatgaggggcgtcttaaaattgcagactttggttggtctgttcagtctagaagcaaaagacataccatgtgtggaacattggattatttagcaccagaaatggttgaaaacaaagctcatgactatgcagttgacaactggactttgggtatcctttgttatgagttcctctatggtgctcctccatttgaggctgagagtcaatctgataccttcaaaaggataatgaaggttgatctaagcttcccttccaccccttctgtctctatagaggcgaaaaatctgattagtcggctcctggtgaaagactcctcacgaaggctctctcttcagaagataatggagcatccttggataatcaagaatgcagattttgtgggtatttgctag

SEQ ID NO: 11320 - protein, 282 aa, Glycine max
MASQNPAEEENSKRHWSLEDFEIGKPLGRGKFGRVYVAREVKSKFVVALKVIFKEQIDKYRVHHQLRREMEIQTSLRHANILRLYGWFHDADRVFLILEYAHKGELYKELRKKGHLTEKQAATYILSLTKALAYCHEKHVIHRDIKPENLLLDHEGRLKIADFGWSVQSRSKRHTMCGTLDYLAPEMVENKAHDYAVDNWTLGILCYEFLYGAPPFEAESQSDTFKRIMKVDLSFPSTPSVSIEAKNLISRLLVKDSSRRLSLQKIMEHPWIIKNADFVGIC

SEQ ID NO: 11321 - DNA, 1395 bp, Zea mays
  CDS (192)..(1070)
acgggcatcctgcccatccagtaccagtggggcgactgggcgaggcgagccaaggattcgaccgttgcgttctccgcccaaaccttaaagccccgaccccctagcgccccccggccgcaaacttcgcctcgccgctccccctccctacgcaagcttcctccccctccgcgccgctcctccaggctccagccatggcgatcgccaccgagtcgcgcggcagcgaggacagggcttcagcccatgcaaacgaggagaagcggtgggtgctgtctgatttcgaggttgggaagcctcttgggaggggcaaattcggccacgtatatcttgccagagaaaagaggagcaatcaaattgtggctttgaaagttcttttcaagagccagcttaagcaatcacaggtcgagcatcagctgcgacgcgaagtggagattcagagtcatcttcgtcatcctaatattcttcgcctgtatgggtacttctatgatcagacccgggtttacctaatcctggaatatgctgccaagggtgagctgtataaggaactgacaaggtgtaaacatttttctgagagacgttcagcaacttatattgcatcattggctagagctctgatctacctgcatgggaagcatgttatccatcgggacattaaaccagaaaatcttttggttggagcccagggtgagatcaaaattgccgactttggctggtctgtgcataccttcaacagaagaaggactatgtgcggaaccctggattacctgccacctgaaatggttgagaagacagaacatgattaccatgttgacatatggagcctgggtattctgtgttatgagttcctttatggggtcccaccttttgaagctaaggagcactcagaaacatacagaaggatagtaaaagtcgacttgaagttcccactgaaaccattcgtttcgcccgctgcaaaggatttgatttcccagatgctggtcaagaactcggcccagcggctgcctctccacaaggttcttgagcacccatggatcgtccagaacgccgacccttccggtgtgtgcagaggatagaaccaccaccaccgtctgaagggagtgcgattctttccactctccccatttcgaggggagtgcgattctttcgactgtttatggcttctgtcgcccgaattgccccaccccgaactgtatcttgtagcaccgtgtactgtgtagttggggccgtgggcaaattgccctgtacccttgaacaaccttctttactcgtagtctcgtatgagagagccttgtagagtctcgtccgtccaattatgaactccagggcaatgtgcaggaaaatgttgaaggtatcgtccataaccagcaaaacttatgtagcgagctcaatttagaattt

SEQ ID NO: 11322 - protein, 292 aa, Zea mays
MAIATESRGSEDRASAHANEEKRWVLSDFEVGKPLGRGKFGHVYLAREKRSNQIVALKVLFKSQLKQSQVEHQLRREVEIQSHLRHPNILRLYGYFYDQTRVYLILEYAAKGELYKELTRCKHFSERRSATYIASLARALIYLHGKHVIHRDIKPENLLVGAQGEIKIADFGWSVHTFNRRRTMCGTLDYLPPEMVEKTEHDYHVDIWSLGILCYEFLYGVPPFEAKEHSETYRRIVKVDLKFPLKPFVSPAAKDLISQMLVKNSAQRLPLHKVLEHPWIVQNADPSGVCRG

SEQ ID NO: 11323 - DNA, 1068 bp, Schizosaccharomyces pombe
  CDS (1)..(1068)
atgtcagattcaaagttggcagattctttgaattgcctttctgtgtcaactccatcaaccacagctaatcctgggagacaacagcttttacgacttgcagtatcaaaccaacgacaagtaaataatgttagtctagcaaatgggaaggaaaacaaacggacttcaaatagcaagttcaattcttcccttcgtaagatagaagagccaattgctggagtaccttcatcagctggtcctcaatggcgagaatttcatattggaatgtttgaaattggaaaacccttagggaaaggaaagtttggaagggtatatctagctaaagagaagaagaccgggtttattgtggctctcaaaacattgcataagtctgaacttgtccagtcaaagatagaaaagcaagttcgacgagaaattgagattcaatcaaatcttcgccataaaaacattttacggctatatgggcactttcatgatgaaaaaaggatttatttgattttagagtttgctggcaggggtgagttgtatcaacacttgcgtcgtgcaaaacgattctcagaagaagttgcgtctaaatatatcttccaaatggctaacgccttatcctacttgcataagaagcatgtaatacaccgtgatatcaaacctgagaacattttattaggaattgatggagaaatcaagctttctgactttggttggagtgtccatgcaccttctaaccgtcgtaccactttatgtggtacattagattacttaccacctgaaatggtggagggaaaagagcataccgaaaaagttgatctctggtcgttgggtgtcttaacttatgagtttttggtgggagcaccgccttttgaggacatgtctggtcattcagctacgtataagcgtatcgccaaagttgacttaaaaattccaagctttgttcctcctgatgcacgggatcttatttctcgtctattacagcataatcctgaaaaaagaatgagtttggaacaagttatgaggcacccttggattgtaaaatataaagattcatggactcgcaaaagttctgaatcttcctaa

SEQ ID NO: 11324 - protein, 355 aa, Schizosaccharomyces pombe
MSDSKLADSLNCLSVSTPSTTANPGRQQLLRLAVSNQRQVNNVSLANGKENKRTSNSKFNSSLRKIEEPIAGVPSSAGPQWREFHIGMFEIGKPLGKGKFGRVYLAKEKKTGFIVALKTLHKSELVQSKIEKQVRREIEIQSNLRHKNILRLYGHFHDEKRIYLILEFAGRGELYQHLRRAKRFSEEVASKYIFQMANALSYLHKKHVIHRDIKPENILLGIDGEIKLSDFGWSVHAPSNRRTTLCGTLDYLPPEMVEGKEHTEKVDLWSLGVLTYEFLVGAPPFEDMSGHSATYKRIAKVDLKIPSFVPPDARDLISRLLQHNPEKRMSLEQVMRHPWIVKYKDSWTRKSSESS

SEQ ID NO: 11325 - DNA, 879 bp, Zea mays
  CDS (1)..(879)
atggcgatcgccaccgagtcgcgcggctgcgaggacagggattcagcccatgcaaacgaggagaagcggtgggtgctgtctgatttcgaggttgggaagcctcttgggaggggcaaattcggccacgtatatcttgccagagaaaagaggagcaatcaaattgtggctttgaaagttcttttcaagagccagcttaagcaatcacaggtcgagcatcagctgcgacgcgaagtggagattcagagtcatcttcgtcatcctaatattcttcgcctgtatgggtacttctatgatcagacccgggtttacctaatcctggaatatgctgccaagggtgagctgtataaggaactgacaaggtgtaaacatttttctgagagacgttcagcaacttatattgcatcattggctagagctctgatctacctgcatgggaagcatgttatccatcgggacattaaaccagaaaatcttttggttggagcccagggcgagatcaaaatcgccgactttggctggtctgtgcataccttcaacagaagaaggactatgtgcggaactctggattacctgccacctgaaatggtggagaagacagaacatgattaccatgttgacatatggagcctgggtattctgtgttatgagttcctttatggggtcccaccttttgaagctaaggagcactcagaaacatacagaaggatagtaaaagtcgacttgaagttcccactgaaaccattcgtttcgcccgccgcaaaggatttgatttcccagatgctggtcaagaactcggcccagcggctgcctctccacaaggttcttgagcacccatggatcgtccagaacgccgacccttccggtgtgtgcagaggatag

SEQ ID NO: 11326 - protein, 292 aa, Zea mays
MAIATESRGCEDRDSAHANEEKRWVLSDFEVGKPLGRGKFGHVYLAREKRSNQIVALKVLFKSQLKQSQVEHQLRREVEIQSHLRHPNILRLYGYFYDQTRVYLILEYAAKGELYKELTRCKHFSERRSATYIASLARALIYLHGKHVIHRDIKPENLLVGAQGEIKIADFGWSVHTFNRRRTMCGTLDYLPPEMVEKTEHDYHVDIWSLGILCYEFLYGVPPFEAKEHSETYRRIVKVDLKFPLKPFVSPAAKDLISQMLVKNSAQRLPLHKVLEHPWIVQNADPSGVCRG

SEQ ID NO: 11327 - DNA, 891 bp, Zea mays
  CDS (1)..(891)
atggcggtcgccaccgagtcgcgcggcagcgaggacagggcttcagcccatgcgaaccaggagaagcggtgggtgctgtctgatttcgaggttgggaaacctcttgggaggggcaagtttggccatgtttatcttgccagagaaaaaaggagtagtgagattgtggctttgaaagttcttttcaagagccagctcaagcaatcacaggttgagcatcagctgcgacgcgaagtggagattcagagtcatcttcgccatcctaatattcttcgcctgtatgggtacttctatgatcagaccagggtttacctaatcctggaatacgctgccaagggtgaactgtataaggaactgacaaggtgtaaacatttttcagagcgacgcacagcgacttatgtcgcatcgttggctagagctttgatctaccttcatggcaagcatgttatccatcgggacattaaaccagagaatcttttagttggagttcagggcgagatcaaaattgccgactttggctggtccgtgcacaccttcaacagaagacggactatgtgcggaactctggattacctgccacctgaaatggtggagaaggcagaacatgattaccatgttgatatatggagccttggtgttctgtgctatgagttcctttacggggtcccacctttcgaagctaaggagcactcagaaacctacagaaggatagtgaaagtcgacttgaagttcccactgaaaccattcgtttcacctgccgcaaaggacttgatttctcagatgctggtcaagagctcggcgcagcggctgcctctccacaaggttcttgagcacccgtggatcgtccagaacgccgacccttccggcgtgtacagagaaggtagatccgtctaa

SEQ ID NO: 11328 - protein, 296 aa, Zea mays
MAVATESRGSEDRASAHANQEKRWVLSDFEVGKPLGRGKFGHVYLAREKRSSEIVALKVLFKSQLKQSQVEHQLRREVEIQSHLRHPNILRLYGYFYDQTRVYLILEYAAKGELYKELTRCKHFSERRTATYVASLARALIYLHGKHVIHRDIKPENLLVGVQGEIKIADFGWSVHTFNRRRTMCGTLDYLPPEMVEKAEHDYHVDIWSLGVLCYEFLYGVPPFEAKEHSETYRRIVKVDLKFPLKPFVSPAAKDLISQMLVKSSAQRLPLHKVLEHPWIVQNADPSGVYREGRSV

SEQ ID NO: 11329 - DNA, 858 bp, Zea mays
  CDS (1)..(858)
  misc_feature (417)..(417): s is g or c
atgtcgacgagtgaggtgtggagcttgtccgatttcgaaatcagcaagtgcatcggtgagggcaggttcggcaaggtctacctcgcccgcgagaagcagagcgggtacgtggtggcgctcaaggtgatatttaaggcgaaactgcagaagtaccacttccacgcgcacctgcggcgggagatcgagatccagcagagtctcgaccaccctaacgtgctccgcctcttcacctggttccacgacgaagagcgagtcgtcctcgtcctcgagtacgcggcccgtggcgagctctacaaggtccttcgcgctgctggccgcttcaccgagcgcacgtccgccacatatgtagcgagtcttgctggtgcactggcatactgtcacaaaaagcaagtcattcatagggacatcaagcctgasaatttgctaatcgacatcgagggccggcttaaaattgcagattttggatgggcggctcgttcaaatgctaaacgccacacactctgtggcacaatcgattatctggcaccagagatggtagagaaaaaagctcatgaccatgctgtggacaactggacattaggaatcctgtgctatgagttcttatatggttcacctccttttgaagctgatgaacaggatgataccttgagaaggatagttagggtggatttggcattcccttcatctccttgtgtatcttcagaggctaaggatctcatttccaagcttctagttaaggattcaagcaagaggctttgccttgaagacatcatgaagcatccatggataaagaagaatgcagacccttcaggcagttgcattaagcaaaaagatgtcacaagatcaaagcttctgtag

SEQ ID NO: 11330 - protein, 285 aa, Zea mays
  misc_feature (139)..(139): The Xaa at location 139 stands for Asp, or Glu.
MSTSEVWSLSDFEISKCIGEGRFGKVYLAREKQSGYVVALKVIFKAKLQKYHFHAHLRREIEIQQSLDHPNVLRLFTWFHDEERVVLVLEYAARGELYKVLRAAGRFTERTSATYVASLAGALAYCHKKQVIHRDIKPXNLLIDIEGRLKIADFGWAARSNAKRHTLCGTIDYLAPEMVEKKAHDHAVDNWTLGILCYEFLYGSPPFEADEQDDTLRRIVRVDLAFPSSPCVSSEAKDLISKLLVKDSSKRLCLEDIMKHPWIKKNADPSGSCIKQKDVTRSKLL

SEQ ID NO: 11331 - DNA, 867 bp, Arabidopsis thaliana
  CDS (1)..(867)
atggggatttctacagagacgcagcaaattgcggcttcagaggctgcacaaaagagatggactacaagcgatttcgatatcggaaagccacttggtagaggaaagtttggccatgtttatctagcaagagagaaacggagcgatcacattgtggctttaaaggttctttttaaggctcagcttcaacaatctcaagttgaacaccagttacgaagggaagtagagattcaatctcatcttcggcatcccaatattctgcggctctacggttacttctatgatcagaaaagagtttatttgattttggagtatgctgtaaggggtgagctttataaagagcttcagaagtgcaagtacttcagcgaacgtcgagcagcaacttatgttgcgtcattggctagagccctcatctattgccatggaaagcatgtaattcacagagatataaaacctgaaaatctgttgattggtgctcagggtgagctcaagattgcagattttggatggtcagtacacacattcaaccgtagaaggactatgtgtggcactttggattaccttccacctgagatggtggaaagcgttgaacatgatgcgagtgtcgatatatggagtctaggaattctctgctacgaatttctttatggtgttcctccttttgaggccagggagcattcagagacatacaaaaggattgttcaagtggatctcaagttccctcccaaacccattgtgtcatcatctgcaaaggacctgattagccagatgttggttaaggagtctacgcaacgtttggccttgcacaagcttcttgaacacccgtggattgtgcaaaacgcagacccatcaggcctttacagaggatga

SEQ ID NO: 11332 - protein, 288 aa, Arabidopsis thaliana
MGISTETQQIAASEAAQKRWTTSDFDIGKPLGRGKFGHVYLAREKRSDHIVALKVLFKAQLQQSQVEHQLRREVEIQSHLRHPNILRLYGYFYDQKRVYLILEYAVRGELYKELQKCKYFSERRAATYVASLARALIYCHGKHVIHRDIKPENLLIGAQGELKIADFGWSVHTFNRRRTMCGTLDYLPPEMVESVEHDASVDIWSLGILCYEFLYGVPPFEAREHSETYKRIVQVDLKFPPKPIVSSSAKDLISQMLVKESTQRLALHKLLEHPWIVQNADPSGLYRG

SEQ ID NO: 11333 - DNA, 867 bp, Arabidopsis thaliana
  CDS (1)..(867)
atgagtaagaaatcgacagaatctgacgctggcaatactgagaagcaatggtccctggcagatttcgagatcgggagaccacttggaaaaggcaaatttggcagagtctatctcgcccgagaagccaagagcaagtacatagtggcgctgaaagtcatattcaaggaacagatagagaagtataaaattcatcatcagcttaggagagaaatggagatccaaacgagtttaaggcacccaaatatcttgcgtctttttggttggttccatgacaatgagaggattttcttgattctcgagtatgctcatggtggtgagctctatggtgtgctcaaacagaatggtcatcttactgaacaacaagccgccacttacattgcaagtctcagtcaggcactggcctattgtcatggcaaatgtgtgattcatagagacatcaaacctgaaaatttgttgctcgatcatgaggggagattgaaaattgctgactttggatggtcagttcagtcaagtaacaagaggaaaacaatgtgtggaaccttggattacttagcacctgagatggtagaaaatagagatcatgattatgcagttgataactggaccttaggcatactgtgttacgagtttctctacggtaaccctccattcgaagccgagagtcaaaaagatacattcaagagaattcttaagattgatctgagttttcctcttacaccgaatgtttcagaagaagccaaaaatcttatcagtcagcttcttgttaaggatccctccaaacgactctctattgagaagatcatgcaacatccatggattgtcaagaacgcagatccgaaaggtgtgtgtgcctcaattgatatttga

SEQ ID NO: 11334 - protein, 288 aa, Arabidopsis thaliana
MSKKSTESDAGNTEKQWSLADFEIGRPLGKGKFGRVYLAREAKSKYIVALKVIFKEQIEKYKIHHQLRREMEIQTSLRHPNILRLFGWFHDNERIFLILEYAHGGELYGVLKQNGHLTEQQAATYIASLSQALAYCHGKCVIHRDIKPENLLLDHEGRLKIADFGWSVQSSNKRKTMCGTLDYLAPEMVENRDHDYAVDNWTLGILCYEFLYGNPPFEAESQKDTFKRILKIDLSFPLTPNVSEEAKNLISQLLVKDPSKRLSIEKIMQHPWIVKNADPKGVCASIDI

SEQ ID NO: 11335 - DNA, 885 bp, Arabidopsis thaliana
  CDS (1)..(885)
atggcgatccctacggagacacaacaccaggagaaggaggcttcagatgcttctgcagcagctgcacaaaagagatggactttaagcgatttcgacatcggtaagcctcttggcagaggcaaattcggtcacgtctatctcgccagagaaaaacggagcaatcacgttgtcgctctaaaggttcttttcaagagccagcttcaacaatcccaagttgaacatcagctcagaagagaagttgagattcagtctcatcttcgtcaccccaacatactccggctttatggctatttctatgatcaaaaaagagtttatttgatacttgagtatgctgctagaggcgaactttacaaggatcttcagaaatgcaaatacttcagcgaaagacgagctgctacttatgttgcctcattggcgagggctctcatctattgccatggcaagcatgtgatacacagagatattaaaccagagaatctgctaattggtgctcagggtgagctcaagattgcagactttggttggtcggtacacacatttaaccgaagaaggaccatgtgtggcacactagattaccttcctcctgagatggtcgaaagcgtagaacatgatgctagtgtagatatctggagccttgggattctctgttacgagtttctttatggtgtacctccttttgaagccatggagcactcagacacatacagaaggattgtgcaagtggatctcaagttccctcccaaaccaataatctctgcatctgcaaaggatcttattagccagatgcttgtcaaggagtcttcgcaacgtctgccattgcacaagcttctggagcatccgtggatcgtgcaaaacgctgatccttctggaatctacagagtttaa

SEQ ID NO: 11336 - protein, 294 aa, Arabidopsis thaliana
MAIPTETQHQEKEASDASAAAAQKRWTLSDFDIGKPLGRGKFGHVYLAREKRSNHVVALKVLFKSQLQQSQVEHQLRREVEIQSHLRHPNILRLYGYFYDQKRVYLILEYAARGELYKDLQKCKYFSERRAATYVASLARALIYCHGKHVIHRDIKPENLLIGAQGELKIADFGWSVHTFNRRRTMCGTLDYLPPEMVESVEHDASVDIWSLGILCYEFLYGVPPFEAMEHSDTYRRIVQVDLKFPPKPIISASAKDLISQMLVKESSQRLPLHKLLEHPWIVQNADPSGIYRV

SEQ ID NO: 11337 - DNA, 819 bp, Encephalitozoon cuniculi GB-M1
  CDS (1)..(819)
atggtggagtactggactttggacaggtttgaaataggaagattgcttgggcgtggaaagttcgggcaggtatggcttgcaagagagagggaaaaggggtttatagttgcgttgaagattattccaatcaaggaaatccagacggtggagacggcaaggcagatccgcagagagattgagatacactccaacctgaagcatcccaacattctgaggatgtatggtcatttccacgacaaggacaatatatatctgatactggaatatgcagggaagggcgagttctttaagttccttagcgaccggggaggcaagttcggggagaaagagacatctctatacataagacaggtgatgctggcgctgacatacatgaaggagtgtaatgtgatacacagagacataaagccagagaatctgctgcttgggtcagacaaccagctcaagatagcagattttggatgggcggtttataatgctgacaagaggcggatgaccttctgtggtacaatggagtatcttgccccagagatggttaacaacgatatacacgactcagggatagacctgtggtgcctggggatcctaacgtatgagtttctcatgggaaaaactccgtttgaaagtaagaacaggaacatgagggaggcctataagaaaatcaactcactgaagtataccattccagagacgattagctccaacgcttcagacttcatttccagacttcttgtgttgagtcctggcgacagaatggaacttacagaggctctaaatcatccgtttattgtaaagcaccacgggaggtccagtgattag

SEQ ID NO: 11338 - protein, 272 aa, Encephalitozoon cuniculi GB-M1
MVEYWTLDRFEIGRLLGRGKFGQVWLAREREKGFIVALKIIPIKEIQTVETARQIRREIEIHSNLKHPNILRMYGHFHDKDNIYLILEYAGKGEFFKFLSDRGGKFGEKETSLYIRQVMLALTYMKECNVIHRDIKPENLLLGSDNQLKIADFGWAVYNADKRRMTFCGTMEYLAPEMVNNDIHDSGIDLWCLGILTYEFLMGKTPFESKNRNMREAYKKINSLKYTIPETISSNASDFISRLLVLSPGDRMELTEALNHPFIVKHHGRSSD

SEQ ID NO: 11339 - DNA, 1185 bp, Aspergillus terreus NIH2624
  CDS (1)..(1185)
atggcgaccaaaacgctggaggctcgcttcgagcacctcactgtcaaagatgagaacgaagccggaaggaatggcagtggataccctaagcacaagggttccctatctaccgctgtgtccctgtcaggtctgggaccgacgacgcagctgaacagcggatcgaaccgctcgcatttgctgaagcttgccctgcagaataccaatgacaataaggtgaatgcgatgaacgtgaactcgtcgtcaccaaccaagggtaccctatctcatcggtatgtggacgaaaacggagaaaaacgacagtcaacgccgttgtatgagcagcccgaaccgaagaagctacacctcgggatgtttgaaattggaaagcctctgggaaaggggaaatttggtcgggtttatctggccaaagagcggtcctccggttttgtgtgtgcactgaaggtgctccacaagtccgagctacaacaagggggtgtccagaagcaggtcagacgggagattgagatccagagcaacttaaggcatcctaacgtcttgagactctatggtcacttccacgacagcaagcggatcttcttgattctcgagttcgctggccgtggtgagctgtacaagcatctccgaaaggagcaccgcttcccggagtggaaggctgcccagtacattgctcagatggccgcagcattgaaatacctgcacaagaagcatgttatgcatcgtgacatcaagcccgagaacatcttggtcgggatccacggggagatcaagatcagtgactttggctggagcgtacatgctcctaacaaccggcgacagacgatgtgcggcacattagattatctgccgccggagatgctgaagcctggctcccaggacaacttttacaacgaaaaggtcgacctgtggagtttgggtgtcctgacctatgaatttttggtcggggaggctcccttcgaagacaccccggtcatgacgcaaagacggattgcgcgtgctgacatgagtgtgccgtcctttgttagtcccgaggcgaaggacctcatcaaacggttgcttgtattggaccccgagaagcgtatttcgctggacgagattcaacgccacccttggattctaaaacactgcgtgaaggatgacaagggagtcaaacggagttctggttcaaccaaggagggtaaagcatga

SEQ ID NO: 11340 - protein, 394 aa, Aspergillus terreus NIH2624
MATKTLEARFEHLTVKDENEAGRNGSGYPKHKGSLSTAVSLSGLGPTTQLNSGSNRSHLLKLALQNTNDNKVNAMNVNSSSPTKGTLSHRYVDENGEKRQSTPLYEQPEPKKLHLGMFEIGKPLGKGKFGRVYLAKERSSGFVCALKVLHKSELQQGGVQKQVRREIEIQSNLRHPNVLRLYGHFHDSKRIFLILEFAGRGELYKHLRKEHRFPEWKAAQYIAQMAAALKYLHKKHVMHRDIKPENILVGIHGEIKISDFGWSVHAPNNRRQTMCGTLDYLPPEMLKPGSQDNFYNEKVDLWSLGVLTYEFLVGEAPFEDTPVMTQRRIARADMSVPSFVSPEAKDLIKRLLVLDPEKRISLDEIQRHPWILKHCVKDDKGVKRSSGSTKEGKA

SEQ ID NO: 11341 - DNA, 1200 bp, Chaetomium globosum CBS 148.51
  CDS (1)..(1200)
atggcgacgacaacaagaacgttggaaggctgctttgaccgcctttcagtgaacgacgagaatgatcctggggagaacacccggctttaccaaaagaccaagccgatcaactcctccagccaactcggcggcgccagaccgaatcacctcctgaaggttgcgctccaagcacaacacaccaacaccgtcatcacgacggtgaaccttccctcgcaagcggcccaacgaaagggcacagcgcccccagccaaccccgtttcccccaagaaggagaagccgtcatcattatcatcacgcccctccgatgaagattctctcgacagcgcttcctcctacgtcgaccagcccctcgttcctaaacaattccatctcggcatgtttgagattggccgccctctcggaaagggcaagttcggccgcgtatatctcgcgcgtgagcgcggcactggcttcatctgcgcgctcaaggtgctctacaagtcggaactgcagcagggcaccggcgtcgagaagcaggtccgccgcgagatcgagatccagagcaacctgcgccaccccaacatcctcaagctctacgggcacttccacgacagcaagcgcatcttcctgatcctcgagtttgccggcaagggtgagctgtacaagcacccccgtcgcgagagccgattccccgagtggaaggccgcgcaatacatcgcccagatggcggcggcgctgaaatacctgcaccgcaagcacgttatccacagagacatcaagcctgagaacatcctggtgggaatacacggcgagatcaagatctcagatttcggctggagtgtgcacgcccccaacaataggcggaacacgctgtgcggtaccctggactacctcccgcccgagatgatcaagtccggcagcaaggacaactggtacaatgagaaggttgacctgtggagtttgggtgtcttgatgtacgagttcctggtcggtgaggcgccgtttgaggacacgcccatcatgacgcacaagcggatcgccagggctgatatgaccatcccggagtgggtgagcaaggaggccaaggacctcatcaaaaagctgttggtgcttgatcccgagaagcgacttcccctcgaggaggtccagaaccacccctggatcatcaaacactgtgtgaagggcgagcgggcggccaacagggagaagccggtcaaataa

SEQ ID NO: 11342 - protein, 399 aa, Chaetomium globosum CBS 148.51
MATTTRTLEGCFDRLSVNDENDPGENTRLYQKTKPINSSSQLGGARPNHLLKVALQAQHTNTVITTVNLPSQAAQRKGTAPPANPVSPKKEKPSSLSSRPSDEDSLDSASSYVDQPLVPKQFHLGMFEIGRPLGKGKFGRVYLARERGTGFICALKVLYKSELQQGTGVEKQVRREIEIQSNLRHPNILKLYGHFHDSKRIFLILEFAGKGELYKHPRRESRFPEWKAAQYIAQMAAALKYLHRKHVIHRDIKPENILVGIHGEIKISDFGWSVHAPNNRRNTLCGTLDYLPPEMIKSGSKDNWYNEKVDLWSLGVLMYEFLVGEAPFEDTPIMTHKRIARADMTIPEWVSKEAKDLIKKLLVLDPEKRLPLEEVQNHPWIIKHCVKGERAANREKPVK

SEQ ID NO: 11343 - DNA, 1170 bp, Coccidioides immitis RS
  CDS (1)..(1170)
atggcaaagacactagaagctcgatttgaacagctgtcagttaatgacgagaatactccaccaagtggccacactggctcagaaaagcccaagcccggtttaccaaaggctctcccaatatcaggcttgtccactgccagccaggcctcactaaacgccggccgcgcgaacctattaaaatttgcgctacagaacaatgaaggaaggctgcatctgaatactgcttcacctccatataaaaaggagaacgggtcttcccgtccccccgaggagagcagtgctgcaagcaacctttacggccagccagcggtcgcgaaaaactggcatcttggaatgtttgagattggaaaaccccttggtaaagggaagtttggacgggtttatctcgccagagagcggagttcgggctttgtttgcgccctgaaagttcttcataagcatgagttggtgaaaggaggcgtcgagaaacagttgcggcgagagatcgaaattcagagcaacctcagacatcccaacattctacgtctgtttggtcacttccacgactcgaagagagtgttcctgattcttgaattcgccgggaacggagaattgtatagacatttacgaaaggagaatcgatttccagagtggaaagccgcacagtacattgcacaaatggcggctgcgttgaaatatctacacaaaaaacatgtcatgcaccgggatatcaagcccgaaaacatccttgtcgggattcatggagaaattaaaatcagcgactttggctggagtgtccatgcccctaacaatcggcgaaaaacgatgtgcggtacccttgactacctgccaccggagatgctcatccctggaagccaagacaactactatgatgaaaaagtggacttgtggagcttgggtgttctcacctacgaattcctcgttggcgaagctcctttcgaagacactccttttctaactcggaggcgcattgcgcgaggtgatatgacgattccttcctttgtgagctcagaggcaagggacctgatcaaaagattgctagtccttgacccctccaagcgtattcctctggatgaggttcaaaagcacccatggattatcaaacattgcatcaaaggcgaaagagcatcacaaagaagttccagaaaggaagcaaaaggagataattga

SEQ ID NO: 11344 - protein, 389 aa, Coccidioides immitis RS
MAKTLEARFEQLSVNDENTPPSGHTGSEKPKPGLPKALPISGLSTASQASLNAGRANLLKFALQNNEGRLHLNTASPPYKKENGSSRPPEESSAASNLYGQPAVAKNWHLGMFEIGKPLGKGKFGRVYLARERSSGFVCALKVLHKHELVKGGVEKQLRREIEIQSNLRHPNILRLFGHFHDSKRVFLILEFAGNGELYRHLRKENRFPEWKAAQYIAQMAAALKYLHKKHVMHRDIKPENILVGIHGEIKISDFGWSVHAPNNRRKTMCGTLDYLPPEMLIPGSQDNYYDEKVDLWSLGVLTYEFLVGEAPFEDTPFLTRRRIARGDMTIPSFVSSEARDLIKRLLVLDPSKRIPLDEVQKHPWIIKHCIKGERASQRSSRKEAKGDN

SEQ ID NO: 11345 - DNA, 1191 bp, Neosartorya fischeri NRRL 181
  CDS (1)..(1191)
atggctaccaaggcgctagaggctcgttttgagcatctctctgtcaaagatgatgctgatcatgggaagaatggcagcacatactcgaaacacaagggctctttgtcaacagcggtgtccctctcaggcctcggagccgctgggcagtttaacagtggctcaagtcgatcaaccttgttgaagcttgccctgcaaaacacaaatgagaacaaagtgaatgcgatgcatgccggctcgtcccctctcaagggagctcagagcacattgccgcaccgtgacacagatgagaatggagaaccgcgacacacgacaccattatacgagcagcccggccccaagaaattacatctgggaatgtttgagatcggcaagcccttgggaaaggggaaatttggtagggtttacctggccaaagagcgatcgtccggcttcgtttgtgctcttaaagtcctgcacaaatccgagctgcagcaggggggagtgcagaagcaagttagacgcgagattgaaatacagagcaacctacgtcatcccaatgttctcagactttacggccacttccatgatagcaagcgaattttcttgatcctggagttcgccggccgaggagagttgtacaagcacctccggaaggagcatcgctttcccgagtggaaggcagctcaatatattgcgcagatggctgccgcattgaagtacttgcataagaagcacgtcatgcatcgcgacatcaagccggagaacatactcgtgggaatccacggggaaatcaagatcagtgactttgggtggagtgtccatgcgcccaataacagaaggcagacgatgtgtggaacactggactatcttcctcccgaaatgctcaaacccaactcgcaagacaactactacagcgaaaaggttgatttatggagcttgggcgtcttgacttatgaattcttggttggggaagcgcccttcgaagacactcccgtcatgacgcaaagacgaattgcgagagcggacatgacggtgccttcatttgtcagtcccgaggcaaaagatcttatcaagagattgcttgttctcgacccagacaagcgtatttcccttgatgagatccagcgacatccctggatccttaaacattgcttgaaggatgaccgggtcacgaaacggagttctggttcttcaaaagaagtcaaagcatga

SEQ ID NO: 11346 - protein, 396 aa, Neosartorya fischeri NRRL 181
MATKALEARFEHLSVKDDADHGKNGSTYSKHKGSLSTAVSLSGLGAAGQFNSGSSRSTLLKLALQNTNENKVNAMHAGSSPLKGAQSTLPHRDTDENGEPRHTTPLYEQPGPKKLHLGMFEIGKPLGKGKFGRVYLAKERSSGFVCALKVLHKSELQQGGVQKQVRREIEIQSNLRHPNVLRLYGHFHDSKRIFLILEFAGRGELYKHLRKEHRFPEWKAAQYIAQMAAALKYLHKKHVMHRDIKPENILVGIHGEIKISDFGWSVHAPNNRRQTMCGTLDYLPPEMLKPNSQDNYYSEKVDLWSLGVLTYEFLVGEAPFEDTPVMTQRRIARADMTVPSFVSPEAKDLIKRLLVLDPDKRISLDEIQRHPWILKHCLKDDRVTKRSSGSSKEVKA

SEQ ID NO: 11347 - DNA, 1173 bp, Neosartorya fischeri NRRL 181
  CDS (1)..(1173)
atggccatcgctgatgagaacggtgaccacattgcctctaagccgcagcaaaaggccaaagttgcgacttccactacacatctgtcgaacagaagcaagcaaccaaaggactccgagactgctccttacaaaaccactgtcaccaatcttctccaaacaacaccagcaagagtacaacagacttcttcgaagaccagacaccctctctctgttgttgtgtctcaagaatcggatgaagctgtcaatgaagaagacgagcttgcggctacttatgtcaaatcacaagccacagctcaaggccctactcattcccttgcagcccaaataaaaggcagagaatcactttcccaacttcggcaccctctctccgttctatcgcaagcgccgaacgccgctgtcgagcgggaacagcacactgtccggcttactaagcaaccgcagtccaaagtgtttcatttgggcatgttcgaagttggtcgtgcattgggcaagggaaagtttgggcgagtataccttgctcgagaacgcgacaccggttttgtttgtgctttgaaggtactccacaagaatgaaattcagcagggaagggtagaaaaacaggtggctcgtgaaattgagatccagagtaacctgcgacatcccaatattcttcggctctacggtcactttcacgacagaaaacgaatcattttgatactagaatatgccggcaagggtgagctatacaagcatttgcaaaaagagggccgttttcctgagtggaaggctgcacagtacattgcgcaaatggcgaacgctttgcagtacttacaccgcaagcatgtcattcaccgggatattaagcctgaaaatatcctcgtggatgtgcatggagagctaaagatgtcggattttggctggagtgtccacgcgccgagtggccgcaggctcacaaaatgtgggacattggactacttgcccccagagatggtcgatccgagaaagtgtgataagccctatgatcagaatattgacttatggtccctaggggtcctaatgtatgaattcctggttggaagagctccatttgaggatacacctgttatgactcagagaagaatagcgaggggagatatgacaatcccttcttttgttagctctgaagcaaaggacctcatcagaaaggtaagatga

SEQ ID NO: 11348 - protein, 390 aa, Neosartorya fischeri NRRL 181
MAIADENGDHIASKPQQKAKVATSTTHLSNRSKQPKDSETAPYKTTVTNLLQTTPARVQQTSSKTRHPLSVVVSQESDEAVNEEDELAATYVKSQATAQGPTHSLAAQIKGRESLSQLRHPLSVLSQAPNAAVEREQHTVRLTKQPQSKVFHLGMFEVGRALGKGKFGRVYLARERDTGFVCALKVLHKNEIQQGRVEKQVAREIEIQSNLRHPNILRLYGHFHDRKRIILILEYAGKGELYKHLQKEGRFPEWKAAQYIAQMANALQYLHRKHVIHRDIKPENILVDVHGELKMSDFGWSVHAPSGRRLTKCGTLDYLPPEMVDPRKCDKPYDQNIDLWSLGVLMYEFLVGRAPFEDTPVMTQRRIARGDMTIPSFVSSEAKDLIRKVR

SEQ ID NO: 11349 - DNA, 1191 bp, Aspergillus clavatus NRRL 1
  CDS (1)..(1191)
atggctaccaagacgttggaggctcgattcgagcatcttactgtcaaggatgacaacgaggccggaaaacatagcagtacctatgcaaagcacaaggggtctttatccacagccatgtcgctctccagcctgggagctactggacagtacaacagcggctcaagtcgatcgactttgctgaagcttgctttacaaaataccaatgaaagcaaggtgaatgctatgcacgccggatcgtctcctcttaaaggagccccaagcacactaccacatcgcgataccgacgagaatggagaactgcgtcatggcctgccgctgtacgagcagccatcgccaaagaagttgcatctgggaatgttcgagattggcaagcctctaggaaagggtaaatttggcagagtctacctggccaaggagagatcatctggttttgtatgcgccctgaaagtcttgcacaaatccgagttgcaacagggtggagtgcagaagcaagtcagacgagagatcgagatccagagcaatctgcgccaccctaatgttcttcgactctatggccatttccacgacagcaagaggatcttcctgatcttggagttcgcgggccgaggagagttgtataagcatcttcgaaaggagcaccgatttcctgaatggaaggccgctcagtatattgcccagatggctgctgcactgaagtacttgcacaagaagcatgttatgcatcgtgatatcaaaccagagaacattctggttggtattcacggtgagattaagatcagtgactttggttggagcgtccatgcaccaaacaatagaagacagacgatgtgtggtactctggactatctcccgcccgagatgctcaagccgaactcgcaagacaactactacaacgagaaggtcgatttatggagtttgggtgtcttgacgtacgagttcctcgttggagaagcaccttttgaagatacccccgtcatgacgcaaaggcggattgcaagagcggacatgacagtgccctcatttgtgagccccgaggcaaaggacctgatcaaaaggttactcgtcctcgaccccgataagcgcatttcccttgatgaaatccagcgacatccttggattctaaaacattgcttgaaggatgaccgtactaccaagcgtagttctgcgacttctaaagaacccaaggcgtga

SEQ ID NO: 11350 - protein, 396 aa, Aspergillus clavatus NRRL 1
MATKTLEARFEHLTVKDDNEAGKHSSTYAKHKGSLSTAMSLSSLGATGQYNSGSSRSTLLKLALQNTNESKVNAMHAGSSPLKGAPSTLPHRDTDENGELRHGLPLYEQPSPKKLHLGMFEIGKPLGKGKFGRVYLAKERSSGFVCALKVLHKSELQQGGVQKQVRREIEIQSNLRHPNVLRLYGHFHDSKRIFLILEFAGRGELYKHLRKEHRFPEWKAAQYIAQMAAALKYLHKKHVMHRDIKPENILVGIHGEIKISDFGWSVHAPNNRRQTMCGTLDYLPPEMLKPNSQDNYYNEKVDLWSLGVLTYEFLVGEAPFEDTPVMTQRRIARADMTVPSFVSPEAKDLIKRLLVLDPDKRISLDEIQRHPWILKHCLKDDRTTKRSSATSKEPKA

SEQ ID NO: 11351 - DNA, 1194 bp, Aspergillus niger CBS 513.88
  CDS (1)..(1194)
atggcctccaagacattggaagcgcgccttgagcgcctttccgtcaaagacgaaaatgacagcggacacaatggcggtagctacccgaaacctaagagctccctatcaacagctatgtccctttcgggccttggagctgcagggcaatatagcggctccaatcgatccaacctgctgaagctagccctacaaaataccaatgacaacaaagtcaatgccatgaacgttgctcagtcccctacaaagggctcccagaacaccttaccgagtcgcaacctagatgagaatggagagcaacgacaccctaacccgctatatgatcaaccggcaccaaagaagctgcaccttggaatgtttgaaattggaaagcctttgggaaaagggaagtttggtagggtgtacctggccaaagagcggtcttctggttttgtatgtgcgctcaaagtcctacacaaatctgagctgcagcagggtggagtgcagaagcaagtccgccgggaaatcgagattcagagcaatcttcgtcatccgaatgttctaaggctctacggacacttccatgacagcaagcggatctttttgattctcgaatttgccggccggggggagttatataaacaccttcgcaaggaacatcgattccctgaatggaaagctgcccagtacatcgcccaaatggctgctgccttgaaataccttcacaagaagcatgtcatgcatcgtgatatcaaacccgagaatatcctagtcggcatccacggggaaatcaagatcagtgactttggatggagtgtacatgcacccaacaaccggaggcaaacaatgtgtggaacattggactaccttcctcccgagatgctcaagccgggttcacaggataattactacaatgaaaaagtcgatctgtggagcttgggtgttttgacctacgaatttcttgttggagaagctccctttgaggacacccctgttatgacacagaggcggattgcaagagcggatatgtcggttccctcatttgtgagccctgaggcgagagatcttatcaaacggcttcttgttctggatcctgagaagcgaatctctcttgatgaaatccagaggcatccctggattcttaaacactgtgttaaggatgagcgaaccatgaagcgcagttctggttctgcttcgtcaaaggatgccaaacaataa

SEQ ID NO: 11352 - protein, 397 aa, Aspergillus niger CBS 513.88
MASKTLEARLERLSVKDENDSGHNGGSYPKPKSSLSTAMSLSGLGAAGQYSGSNRSNLLKLALQNTNDNKVNAMNVAQSPTKGSQNTLPSRNLDENGEQRHPNPLYDQPAPKKLHLGMFEIGKPLGKGKFGRVYLAKERSSGFVCALKVLHKSELQQGGVQKQVRREIEIQSNLRHPNVLRLYGHFHDSKRIFLILEFAGRGELYKHLRKEHRFPEWKAAQYIAQMAAALKYLHKKHVMHRDIKPENILVGIHGEIKISDFGWSVHAPNNRRQTMCGTLDYLPPEMLKPGSQDNYYNEKVDLWSLGVLTYEFLVGEAPFEDTPVMTQRRIARADMSVPSFVSPEARDLIKRLLVLDPEKRISLDEIQRHPWILKHCVKDERTMKRSSGSASSKDAKQ

SEQ ID NO: 11353 - DNA, 1407 bp, Aspergillus niger CBS 513.88
  CDS (1)..(1407)
atggtgaccgtcgcgcttgagacccggttcaggcatatggccattgtcgatgagaatgctcacgatggtgcgaaacttcaacagaaagctaaaaccacgacttcgacaacacgaccggtgaaccgttctctacgaccaaagaattgcgaaccaaatcctcctaagactgcgaccaccgatcctttccagtccgcatcaacgaaagtccaacaaagtcccccgaggacaagacatccactcgcttctgtagtgtcgcaagtctccgaagatgctttcaatgaagatgaccaacatgccactactgattccaagacaccaactgcacgtcaaagctccacaccctcccaacctccccgacagaaagaaagacaatcatcaacttcacaagctcgccatcctctgtccgttctatcacaggcaccgaatgccgcagtcaagcacgaacaacactccgccaagcttacaagacagccaatgcccagactattacacttaggcatgttcgaaataggcaaagcgctgggcaaaggaaagttcggacgggtctaccttgctcgggagcgagacagcggatttgtttgtgctttgaaggtacttcacaagaatgaaattcaacaaggaagggtagaaaaacaggtggcccgcgagattgagatccagagtaatctgcgccatcctaatattcttcggctctacggccactttcacgatagcaaacgaataatactcatattggagtttgcgggcaagggagagctatacaagcacttgcaaaaggagaacaggtttccggagtggaaggctgcgcagtacattgcgcaaatggcgaatgctctgcaatatctacaccgcaagcatgttatccatcgggatattaagccggaaaatattcttgttggtatccatggagagctcaaaatgtcggatttcggctggagtgttcacgcgccaagtggtcgcaggcttacgaaatgtggcacactggactacttgcctcctgaaatggttgatccgaagaagtgtgataagccgtataatcagaaggtggatttatggtcccttggggttttattgtatgagttcctcgttgggagtgctccatttgaggatacgcctgtcatgacgcagagaaggatcatgaaagcggatatggtaatcccttcttttgtgagtcttgaggcaaaagaccttatcaggaagcttcttgtccttgatgcggatcaaaggatcaccctggaaaaggtccgacaacacccttggattatcaagtactgctcccaacatgcaaaggatgaaaagaaagaagaaatgcctgatcaagaatcgtcctgctattggcatcgaacagagatcacaggactaaggaacctaaacaccattacatggcttgctgtatcaattctttga

SEQ ID NO: 11354 - protein, 468 aa, Aspergillus niger CBS 513.88
MVTVALETRFRHMAIVDENAHDGAKLQQKAKTTTSTTRPVNRSLRPKNCEPNPPKTATTDPFQSASTKVQQSPPRTRHPLASVVSQVSEDAFNEDDQHATTDSKTPTARQSSTPSQPPRQKERQSSTSQARHPLSVLSQAPNAAVKHEQHSAKLTRQPMPRLLHLGMFEIGKALGKGKFGRVYLARERDSGFVCALKVLHKNEIQQGRVEKQVAREIEIQSNLRHPNILRLYGHFHDSKRIILILEFAGKGELYKHLQKENRFPEWKAAQYIAQMANALQYLHRKHVIHRDIKPENILVGIHGELKMSDFGWSVHAPSGRRLTKCGTLDYLPPEMVDPKKCDKPYNQKVDLWSLGVLLYEFLVGSAPFEDTPVMTQRRIMKADMVIPSFVSLEAKDLIRKLLVLDADQRITLEKVRQHPWIIKYCSQHAKDEKKEEMPDQESSCYWHRTEITGLRNLNTITWLAVSIL

SEQ ID NO: 11355 - DNA, 1011 bp, Ostreococcus lucimarinus CCE9901
  CDS (1)..(1011)
atggagaaggagaacgaaggcgtcgggacgggcgggagaggcgcgcggggggacgcgacggcgagcgggaagacgccgagaggcgcgagagggacgccgggagaggggctcgggctcgggctcgggaacgaacggatcgggaacgtcggaggggacgggcgggatggcgcggcgcaggcggggaaggagtggaagttggaagattttgacatcggtaaaccgctcgggaagggcaagtttggttcggtgtacttggcgcgggagaagaagagtaagtacatcgtcgcgctgaaggtgttgcacaagacgcagctgtgcgcgtcgcacgtcgaacaccagttgcgacgggagattgagattcagtcgcacctgagacacccgaatattttgcgtctgtacggatacttttacgacaacacgcgcgtgtttttgattttggagtacgcggcgatgggagagttgtacaaggagttgcagcgtcaaaaacggtttagcgagcggcgaagtgcgacttatatcgcctctttggctcgggcgctgatctattgtcacaagaagcacgtcatccatcgagacatcaagccggaaaacttgctcgtcggcatcaagggcgaattgaaaatcgcggatttcggttggtcggtgcacgcgccgaacagtcgaagacagacgctctgcggtacgctggattacttgccaccagaaatggtggaaggtcgcgaccacgattacgccgtcgatgtgtggtcgctgggcgtattggcgtacgagttcttggtcggaacgccgccgtttgaagccgaagggcacagcgagacgtacaagcgcatcttgcgagtggacttacaatttccgtcgtatattagcgaaaacgccaaggacctcattcgaagcttgctcgtcaaggagccagcgtcgcgcataccgctcagccgattgctagatcacccatggatcaaggagaacgcgtctccaaacggcattcctatccccgaagcagggctcccctga

SEQ ID NO: 11356 - protein, 336 aa, Ostreococcus lucimarinus CCE9901
MEKENEGVGTGGRGARGDATASGKTPRGARGTPGEGLGLGLGNERIGNVGGDGRDGAAQAGKEWKLEDFDIGKPLGKGKFGSVYLAREKKSKYIVALKVLHKTQLCASHVEHQLRREIEIQSHLRHPNILRLYGYFYDNTRVFLILEYAAMGELYKELQRQKRFSERRSATYIASLARALIYCHKKHVIHRDIKPENLLVGIKGELKIADFGWSVHAPNSRRQTLCGTLDYLPPEMVEGRDHDYAVDVWSLGVLAYEFLVGTPPFEAEGHSETYKRILRVDLQFPSYISENAKDLIRSLLVKEPASRIPLSRLLDHPWIKENASPNGIPIPEAGLP

SEQ ID NO: 11357 - DNA, 1176 bp, Ajellomyces capsulatus NAm1
  CDS (1)..(1176)
atgtcgaaaacactcgaggctcggtttgagcatctctccgtcaatgacgaaaatgaacctcccaacaccaccacacactatcataaatcaaaaggccaacacactaccacggcttcgataagctcatcaacctcatcaacacagctgaccagcaacccgaaccgctcaaatctactaaaatacgctctacaaaacagcaacggctcgtctccccgtaagcctcaagggagtgtcagcttggtttcctcttcccgtaactccactgaggaaaacccggcgggcagccgtacttacattcccttctacgatcagcctaccgccccaaagaaattccatctgggaatgttcgaaattgggaagccccttggtaagggaaagtttgggagagtatatcttgcaagagaacgatcgactggcttcgtttgtgctctgaaggtcttgcacaaaagcgagttggtccagggcaaagttgagaagcaactacggcgagagatcgagattcagagcaacttgagacatcccaatatattgcgcttatatggccatttccatgacagcaaacgggtgtttctaattctcgagtttgcggggaatggagagctgtacaaacacctacgaaaggagaaccgattccctgagtggaaggctgcccaatatatcgcccaaatggctgctgcattaaaatatctgcacaaaaaacatatcatgcaccgcgatatcaagccggagaatatacttgtgggcatccacggcgaaatcaagataagcgactttggctggagcgtacatgccccaaataacaggagaaataccatgtgcggcactttggactacctacctccagaaatgctcaaacctggattgcaggacaattactataacgagaaaatcgacctgtggagcttgggtgtgctcacgtacgagttcctggttggcgaggcaccgtttgaagacacgccggtcatgacacggcggaggatagcgaggggtgagatgaaggtgccgtcatttgtgagcgcggaggctagggatcttatcaagaagttattggtcctcgatccagaacagcgaattcctctggatgaggtccaacagcacccctggatcattaaacactgtgtcaaaggcgagagggcagccaagcgaagttcaggaaatagccgtagtaaagagtaa

SEQ ID NO: 11358 - protein, 391 aa, Ajellomyces capsulatus NAm1
MSKTLEARFEHLSVNDENEPPNTTTHYHKSKGQHTTTASISSSTSSTQLTSNPNRSNLLKYALQNSNGSSPRKPQGSVSLVSSSRNSTEENPAGSRTYIPFYDQPTAPKKFHLGMFEIGKPLGKGKFGRVYLARERSTGFVCALKVLHKSELVQGKVEKQLRREIEIQSNLRHPNILRLYGHFHDSKRVFLILEFAGNGELYKHLRKENRFPEWKAAQYIAQMAAALKYLHKKHIMHRDIKPENILVGIHGEIKISDFGWSVHAPNNRRNTMCGTLDYLPPEMLKPGLQDNYYNEKIDLWSLGVLTYEFLVGEAPFEDTPVMTRRRIARGEMKVPSFVSAEARDLIKKLLVLDPEQRIPLDEVQQHPWIIKHCVKGERAAKRSSGNSRSKE

SEQ ID NO: 11359 - DNA, 1116 bp, Botryotinia fuckeliana B05.10
  CDS (1)..(1116)
atggctgcccatgcccttgaatcgcgctttgagcggatgtctgtgaatgatgagaacgatccaggggaaggaaagaaatacatggccaagatcgcatctactacatcttccagcacacaattatcacaaaatgccaatcgagcaaaccttctcaagatggccttgcaaaataagaatacagtaaacacaatcacaacagtcgcaggttcatcacaggagccagcttctccttcaagaaaaccaactacatcataccgagattctgaacaagctgtcagaatcgagcgcaaatcgaaccccatgtatcaggagccagctccagtaaaacagtttcatctaggcatgttcgaaattggtcggcctctcggaaaaggcaaattcggccgtgtatatctcgcaagagaacgtagcactggatttgtttgtgccctgaaagttttacacaaaaatgagatacaaaagggcaaggtagagaagcaggtccgacgggaaatcgaaattcagagtaatctgcggcacccaaatatcctccagttgtatggccattttcatgacagcaagcgagtcttcctaatcctagaatttgctggcaaaggagaactttacaagcatcttcgtagagagacaaaatttccggaatggaaagcagctcactacattgcgcaaatggctgccgctctgaagtatctccacaagaagcatgtcatgcatcgggacataaaaccagaaaatattctggttggcatccatggcgagctcaaaatcgcagactttggttggagtgttcatgcacctaacggcagaagaaatacaatgtgtggaactttagattatcttccacctgagatgttgcagagcaacagcaactattacaacgagaaggtcgacttgtggagtctaggtgtgttgatgtacgagttcctagtcggcgaggctcctttcgaggacactgtagtcatgacacacaggaggatagcaagatgtgaaatgacaattccaggctttgtttcctccgaggcaaaggatctgattaagaggctactggtactgatcccgagaaacgaattcccctcgaacaggttgagaagcacccctggatcatcaagcactgtgtga

SEQ ID NO: 11360 - protein, 371 aa, Botryotinia fuckeliana B05.10
MAAHALESRFERMSVNDENDPGEGKKYMAKIASTTSSSTQLSQNANRANLLKMALQNKNTVNTITTVAGSSQEPASPSRKPTTSYRDSEQAVRIERKSNPMYQEPAPVKQFHLGMFEIGRPLGKGKFGRVYLARERSTGFVCALKVLHKNEIQKGKVEKQVRREIEIQSNLRHPNILQLYGHFHDSKRVFLILEFAGKGELYKHLRRETKFPEWKAAHYIAQMAAALKYLHKKHVMHRDIKPENILVGIHGELKIADFGWSVHAPNGRRNTMCGTLDYLPPEMLQSNSNYYNEKVDLWSLGVLMYEFLVGEAPFEDTVVMTHRRIARCEMTIPGFVSSEAKDLIKRLLVLIPRNEFPSNRLRSTPGSSSTV

SEQ ID NO: 11361 - DNA, 999 bp, Sclerotinia sclerotiorum 1980
  CDS (1)..(999)
atgatgaaaatgatccgggggaaggaaagaaatataagacaaagaaagccagctacgtcctctcgagaatcggagcaaatggctaaagtcgagcgcaaatcgaactccatttaccaggaaccagctccggcaaaacaatttcacctcgggatgtttgaaattggccgaccgctgggcaagggaaaatttggtcgtgtgtatctagcaagagagcgaagtactggattcgtttgtgccttgaaagtcctacacaaaaacgagatacaaaagggcaaggtagaaaagcaggtccggcgggaaattgaaattcaaagtaatttacggcacccaaatatcctccaactatatggccacttccatgacagcaaacgagtctttctgatcctagaatttgctggcaagggagaactctacaagcatcttcggagggagacgaagtttccggaatggaaagcagctcaatacattgcgcaaatggctgcggcattgaagtatctccacaagaagcatgttatgcatagggatataaaaccagaaaatatacttgttggtattcatggcgagcttaaaattgcagacttcggttggagtgtccatgcgcctaacagcagaagagctaccatgtgtggaactttagattatcttccacctgagatgttgcaaggaaatagcaactactacaatgagaaggttgatttatggagtctgggagttttgatgtatgagttcctggttggcgaagctccttttgaagacaccccagtcatgacacagagaaggataacaagatgtgagatgacgattccaagcttcgtgtcctcggaagcaaaggatctgattaaaaggttgctggtacttgaccccgaaaaaaggattcctctcgaacaggttcagaagcacccttggatcatcaagcattgcgtgaagggggagcgggctagtatgcgggattcaaaatccactggcagcaaatcttcactggactccagtgacgaatga

SEQ ID NO: 11362 - protein, 332 aa, Sclerotinia sclerotiorum 1980
MMKMIRGKERNIRQRKPATSSRESEQMAKVERKSNSIYQEPAPAKQFHLGMFEIGRPLGKGKFGRVYLARERSTGFVCALKVLHKNEIQKGKVEKQVRREIEIQSNLRHPNILQLYGHFHDSKRVFLILEFAGKGELYKHLRRETKFPEWKAAQYIAQMAAALKYLHKKHVMHRDIKPENILVGIHGELKIADFGWSVHAPNSRRATMCGTLDYLPPEMLQGNSNYYNEKVDLWSLGVLMYEFLVGEAPFEDTPVMTQRRITRCEMTIPSFVSSEAKDLIKRLLVLDPEKRIPLEQVQKHPWIIKHCVKGERASMRDSKSTGSKSSLDSSDE

SEQ ID NO: 11363 - DNA, 945 bp, Nematostella vectensis
  CDS (1)..(945)
atggctaaaatcccctcaaacactcatcaaacaacagtatcttccttcaacccttctattaccaaacacatgaagggatctaaaggtgggccattcaaattgcttgaaaatatgaagcaggggaagtggaatctatcagattttgacattggaaagcctctcggaaaaggaaaatttggaaatgtttacttggcacgggaaaagaaaagcaaatatattgtagccctgaaggttttatttaaaagccagttacagaaatccaatgtggagcaccaacttagaagggaaattgagattcagtctcatctgaggcacaacaatatcctacgcctgtttgggtatttctatgacgacacacgagtctatcttattcttgaatatgctccccgaggagaactgtataaagaacttactgcttgtgagaagtttgatgagaaaagagcagctaagtatattcgacagcttgcagatgctcttgcttattgtcactctaagaaagtcatccacagagacatcaagcccgaaaaccttctcctgaattataagggtgatatcaagattgcagattttggttggtctgttcatgcaccatcatcacgacgtacgactctctgtgggaccttagactatctgccacccgagatgattgaaggaaaggaacatgatgaaaaagtcgacctttggagcataggtgtcctctgctatgaattccttgttggcaaaccaccttttgaggcagaggggcacaatgagacatacaggagaatttcgagagttgatctaaggttcccatcacatgtcagtcctggagctcgtgacctgataagcaagcttctacagcacaatcccaacaacagacttccactgaaagctgtgcttaaccacccatggatacgaatgcatgccacacctgtcctagaacaaaaaccagccagccaaagatga

SEQ ID NO: 11364 - protein, 314 aa, Nematostella vectensis
MAKIPSNTHQTTVSSFNPSITKHMKGSKGGPFKLLENMKQGKWNLSDFDIGKPLGKGKFGNVYLAREKKSKYIVALKVLFKSQLQKSNVEHQLRREIEIQSHLRHNNILRLFGYFYDDTRVYLILEYAPRGELYKELTACEKFDEKRAAKYIRQLADALAYCHSKKVIHRDIKPENLLLNYKGDIKIADFGWSVHAPSSRRTTLCGTLDYLPPEMIEGKEHDEKVDLWSIGVLCYEFLVGKPPFEAEGHNETYRRISRVDLRFPSHVSPGARDLISKLLQHNPNNRLPLKAVLNHPWIRMHATPVLEQKPASQR

SEQ ID NO: 11365 - DNA, 1131 bp, Vanderwaltozyma polyspora DSM 70294
  CDS (1)..(1131)
atgatggattctaacagaaggcagtcgttaaagcagagaaatttattgttaagtatgcgtttaaataataataataacaataacaataacaatactacaaaagttaagaatattagcggagtaaagaataatagcaatggtaaggtatggagattatcttattctcctaggggtaaaaataatcatcatagtcatggtacatcgtcaaagatcccttctcctgtaaggaatagtgccaatgctactacaattgcaacaacgacagtggcgacaacaggatcaataccagcttcatcaacatcttcacagattaaaggtagattcccaatggtagatttaaaattaaatgattttgaaattggtagaaagttaggtaaaggaaaatttggtaaagtatattgtgttcgtcacaaaccttcgggacttatatgtgcattaaaagtaatgaataaaatggaaattgttaatttcaatgtacaaaagcaattcaaaagagaaattgacattcaatatcatttaaaccataaaaatctaaccaagttatatgcgttcttccacgattcaaaaaatgtttatctagttatggaatacctaataggcggcgagttatacaaattattaaaaaaaaatgggccaatgaatgatattacagcttcaaattacgtttaccaaatgactgatgctttgaattatatgcataaaagaaaaataatacacagagatttaaaaccagaaaatatactgataggttttaataatcaaattaaattgacagattttggttggagtatatataacccaaataatcagaagaggaaaactctttgtggaacaattgattacctttcaccagaattgataagttcaagagagtatgatgaaaatgtagatgtttgggcattaggaatactcacttacgaactagtagtaggagctcccccatttgaagaagatacaaaagaacaaacctacaaacgtatagcaaaatctgatttaaaattccctcccaatgtgtcttcagaagcaagggatctcattacgaatttattaaaagttgttccatcagaaaggttcaacctccaacaagtaatgaatcatccatggatcgaaaagaataaaccattttggtaa

SEQ ID NO: 11366 - protein, 376 aa, Vanderwaltozyma polyspora DSM 70294
MMDSNRRQSLKQRNLLLSMRLNNNNNNNNNNTTKVKNISGVKNNSNGKVWRLSYSPRGKNNHHSHGTSSKIPSPVRNSANATTIATTTVATTGSIPASSTSSQIKGRFPMVDLKLNDFEIGRKLGKGKFGKVYCVRHKPSGLICALKVMNKMEIVNFNVQKQFKREIDIQYHLNHKNLTKLYAFFHDSKNVYLVMEYLIGGELYKLLKKNGPMNDITASNYVYQMTDALNYMHKRKIIHRDLKPENILIGFNNQIKLTDFGWSIYNPNNQKRKTLCGTIDYLSPELISSREYDENVDVWALGILTYELVVGAPPFEEDTKEQTYKRIAKSDLKFPPNVSSEARDLITNLLKVVPSERFNLQQVMNHPWIEKNKPFW

SEQ ID NO: 11367 - DNA, 879 bp, Chlamydomonas reinhardtii
  CDS (1)..(879)
atgctggcacagcgacaagacgcggggcaagccgcgggcaccagcggagggcctaaacgccgctggaccattgacgatttcgacattggaaagccgctcggcaagggcaaattcggcaacgtgtacctggctcgcgagaagcagagcaaatacattgttgcgctgaaggtcctcttcaagagccagctccaacagtccaacgtggagcaccagctacggcgtgaaatcgagatccaggcgcacctgcggcaccccaacatcctgcggctgtacggctacttctatgacaaggagaaggtgtaccttatcctggagtacgcggcccggggagagctgtacaaggagctggtgcgctgcaaccacttcgacgagcgcacgtcggccacgtacatcctgtcgctggcgcgcgcgctgcactactgccacaccaagcacgtgatccatcgcgacgtgaagcccgagaacctgctggtgggcctgaacggcgagctcaagatctcggactttggctggtccgtgcacgcgcccagcaacaggcgcaagacgctgtgcggcaccctggactacctgccgccggagatggtggagggcaaggagcacaccacgtccgtggacaactggagcctgggcgtgctcacctacgagttcctgttcggcggcccgccctttgaggcgcccggccaccaggagacctaccgccggatcgtgcgcgtggacatcaagttccccgacaagccggccgtgtcggattcggccaaggccttcatcagcaagttgctggtgaaggacgcgcaccggcggttgccgctactggaggtccagaacgatccctggattaaggcaaacgccgaccccgacatgctggcgcgcggaaactaa

SEQ ID NO: 11368 - protein, 292 aa, Chlamydomonas reinhardtii
MLAQRQDAGQAAGTSGGPKRRWTIDDFDIGKPLGKGKFGNVYLAREKQSKYIVALKVLFKSQLQQSNVEHQLRREIEIQAHLRHPNILRLYGYFYDKEKVYLILEYAARGELYKELVRCNHFDERTSATYILSLARALHYCHTKHVIHRDVKPENLLVGLNGELKISDFGWSVHAPSNRRKTLCGTLDYLPPEMVEGKEHTTSVDNWSLGVLTYEFLFGGPPFEAPGHQETYRRIVRVDIKFPDKPAVSDSAKAFISKLLVKDAHRRLPLLEVQNDPWIKANADPDMLARGN

SEQ ID NO: 11369 - DNA, 894 bp, Physcomitrella patens subsp. patens
  CDS (1)..(894)
atgggctctgatgctgatgcgaagcttgtgcgccaggaaagtcaaggagcggagaatgggaacaagggtgagaagcgatggtctttgacggacttcgacattggaaaaccgcttggcaggggcaagtttgggaacgtttacctggctcgcgagaaacagagcaagtatgtagtcgcattgaaagttctcttcaagaatcagctccagcaatcccaagttgagcaccaactgcgtcgagagattgaaattcagtctcaccttcgccatcccaacatccttcgcctttacggatacttctacgatcaggcgcgagtgtatttgattctcgagtacgccgccaagggtgagctatacaaggagcttcaaaggtgcaaggtcttcagcgagaagagagcagcaacatatgtcgcctcacttgcccgtgcattgatgtattgtcatgagaagcatgtcattcatcgcgacatcaagcctgagaacctattgataggactgaagggtgagttgaaaattgccgactttggctggtctgtccacacctgcaacagacgcaggacgctctgtggaaccttggactatctgcctccagaaatggtggaggggaaggagcacgacgccggcgtagatgtgtggagcctggggatcctttgcttcgagttcttatacggtaccccaccttttgaggcgaagaagcattcagatacatacaagcgaattgttcgcgttgatctaaggttcccctccaagcctgtcatttctacatcagcccgagatttgatctgccagctcttggtgaaagactctgcccaacggttgcctctcaacaaagtactctcgcatccatggattgtcaataatgctgaccccagtggggtttataacggccataattga

SEQ ID NO: 11370 - protein, 297 aa, Physcomitrella patens subsp. patens
MGSDADAKLVRQESQGAENGNKGEKRWSLTDFDIGKPLGRGKFGNVYLAREKQSKYVVALKVLFKNQLQQSQVEHQLRREIEIQSHLRHPNILRLYGYFYDQARVYLILEYAAKGELYKELQRCKVFSEKRAATYVASLARALMYCHEKHVIHRDIKPENLLIGLKGELKIADFGWSVHTCNRRRTLCGTLDYLPPEMVEGKEHDAGVDVWSLGILCFEFLYGTPPFEAKKHSDTYKRIVRVDLRFPSKPVISTSARDLICQLLVKDSAQRLPLNKVLSHPWIVNNADPSGVYNGHN

SEQ ID NO: 11371 - DNA, 894 bp, Physcomitrella patens subsp. patens
  CDS (1)..(894)
atgggttctgatgctgatgtcaagtatgtgcgccaggaaagccaaggtgcggggggtgacagtatagcggagaaacgatggtcgctaacggattttgacattgggaagccgctgggcaggggcaagtttgggaacgtctacctcgcgcgtgagaaacagagcaagtatgtagtggcgttgaaggttctcttcaaaaatcagttgcagcaatcccaggttgagcatcaacttcgtcgcgagattgagattcaatcgcaccttcgccatcccaacatccttcgattgtacggatacttctatgatcaggcacgtgtgtatctgattctcgagtatgctgccaaaggtgaactctacaaggagcttcagaggtgtaaggtttttagtgagaaaagagcagcaacgtacatcgcctcacttgcacgtgccctcatgtattgccacgagaagcacgtcatccaccgagatatcaaacctgagaatctcctaattggactgaagggtgagctgaagattgcagactttggatggtccgtgcacacctgcaacagacgaaggactctctgtggaaccttggactacctccctcctgaaatggttgagggcaaggaacatgacgcgggtgtggatgtgtggagcctgggcatcctttgcttcgaatttttgtacggcactccaccttttgaagcgaagaagcattcagatacgtataagcgcatcgtccgtgttgatctgaggtttccatccaaacctgtcatctcttcatcggcccgagaccttatctgtcagctcctggtgaaggattcggctcaacgattgcctctcagcaaagtgcttacgcacccgtggattgtaaacaacgccgaccccagcggcgtgtacaatggccacaattga

SEQ ID NO: 11372 - protein, 297 aa, Physcomitrella patens subsp. patens
MGSDADVKYVRQESQGAGGDSIAEKRWSLTDFDIGKPLGRGKFGNVYLAREKQSKYVVALKVLFKNQLQQSQVEHQLRREIEIQSHLRHPNILRLYGYFYDQARVYLILEYAAKGELYKELQRCKVFSEKRAATYIASLARALMYCHEKHVIHRDIKPENLLIGLKGELKIADFGWSVHTCNRRRTLCGTLDYLPPEMVEGKEHDAGVDVWSLGILCFEFLYGTPPFEAKKHSDTYKRIVRVDLRFPSKPVISSSARDLICQLLVKDSAQRLPLSKVLTHPWIVNNADPSGVYNGHN

SEQ ID NO: 11373 - DNA, 1101 bp, Phaeosphaeria nodorum SN15
  CDS (1)..(1101)
atggaggtcgccaaccttgaagctgccttcgaacgcatcaccgtcaccgacgagaacgatgagcaaatcacttcttccaccacctcttaccacaagacgaaggtgaacagtactcaggccaagaatgctgcgaacatctccaaagttaccatcacgtcgtctaccacccgcccgtcggaggtcaacccatcgcatcgccgcacccttaccgagacggccctctacgtcaacccgtcaacaccgaaagcatggcacctcggcatgtttgatatcggcaagcctctcggaaagggcaaatttggtcgtgtatatcttgccaaagagaagtcatcaggcttcgtctgcgcactcaaagtgctccacaaatccgaacttcaacaaggcaaggtcgagaagcaggtgcgacgagaaatcgagatccaatcacacttggcccatcccaacattcttcgcctcttcgggcacttccacgatgcaaagcgtgtcttcttgatcctcgagtttgccggccaaggagaactctacaagcacctccgcaaggagcaacgcttccccgaatggaaggccgcacaatacatcgcccagatggccgcagcgctcaagtatctccacaagaagcacgtcatgcaccgagacatcaagcccgagaacatcctcgtcggcgtccacggcgaaatcaaaatcagcgattttggttggtctgttcacgcacccaacaaccgtcgcaacaccatgtgcggaactctcgactacttgcccccggagatgctgaggggcggcggcaaggacaacttctacagcgagaaggtcgacctgtggagtttgggcgtgttgacatatgagtttttggttggcgaggcacctttcgaggacacgcaagtgatgactcaaagaaagattgcacggggagagtacacagtgcctagctttattagctcagaggcaaaggatcttatcaagaggttactagtccttgaccccgagaagcgaattgcgctcgaggaagtagagcgacacccgtggatcgtcaagcactgcaaaggcagccgtgtccaagtcggcagccgctcgacctcagacgacgacgacgagacctactag

SEQ ID NO: 11374 - protein, 366 aa, Phaeosphaeria nodorum SN15
MEVANLEAAFERITVTDENDEQITSSTTSYHKTKVNSTQAKNAANISKVTITSSTTRPSEVNPSHRRTLTETALYVNPSTPKAWHLGMFDIGKPLGKGKFGRVYLAKEKSSGFVCALKVLHKSELQQGKVEKQVRREIEIQSHLAHPNILRLFGHFHDAKRVFLILEFAGQGELYKHLRKEQRFPEWKAAQYIAQMAAALKYLHKKHVMHRDIKPENILVGVHGEIKISDFGWSVHAPNNRRNTMCGTLDYLPPEMLRGGGKDNFYSEKVDLWSLGVLTYEFLVGEAPFEDTQVMTQRKIARGEYTVPSFISSEAKDLIKRLLVLDPEKRIALEEVERHPWIVKHCKGSRVQVGSRSTSDDDDETY

SEQ ID NO: 11375 - DNA, 1182 bp, Aspergillus oryzae RIB40
  CDS (1)..(1182)
atggccactaagactttggaaagccgcttcgaacatctttcggtcaaggacgagaatgtatcaaacaatagctgtagcacctatgcgaagaataagggctccctgtcaacggctgtctccgtttctggacttgggaccacggctcaattgaacaatagcgccaatcggtcgaatctgctcaagctggctctgcagaatacgaatgacaacaaggtcaattcgataaatgtcagttcatcccctaccaagggtacattatcgcatcgcaacgtagatgagaacggtgaccagcgccaccaaacatcgctttatgaccaaccagcaccgaagaagctacatctgggaatgtttgaaataggaaagcccttgggtaagggtaaatttggccgcgtttatctagccaaagaacgatcatccggttttgtgtgtgctcttaaggtcttgcacaagtctgaattgcaacagggtggggtgcaaaagcaggtccgaagggagattgaaatccagagcaacttacgccacccgaatgttctacgactctatggtcactttcaagacagcaagcgaattttcctgatccttgaatttgccggccggggagagctgtataaacacctgaggaaagaacatcgatttccggagtggaaggctgctcagtatattgcccagatggccgctgccttgaaatatctgcataagaaacatgtcatgcaccgtgacataaagccggagaatattctcgtcggcatccatggtgaaatcaagatcagtgattttgggtggagtgtccatgcgcccaacaacaggaggcagacaatgtgcggaacgcttgattatctaccacccgagatgctcaagccaggctcacaggataactactacagtgaaaaagtcgatttgtggagcttaggtgtactgacttacgaatttttggtcggagaggctccattcgaggacacacctgtcatgacacaaagacggattgcacgagcagacatgacagttccttcctttgtgagccccgaggcaaaagacttaatcaaaagattacttgttcttgatcccgagaagcgtatttcgctagatgaaatccaaaaacacccatggatactcaagcactgtcttaaagacgaccgagctacgaaaaggagttctggttcctcaaaggaaggtaaagcgtga

SEQ ID NO: 11376 - protein, 393 aa, Aspergillus oryzae RIB40
MATKTLESRFEHLSVKDENVSNNSCSTYAKNKGSLSTAVSVSGLGTTAQLNNSANRSNLLKLALQNTNDNKVNSINVSSSPTKGTLSHRNVDENGDQRHQTSLYDQPAPKKLHLGMFEIGKPLGKGKFGRVYLAKERSSGFVCALKVLHKSELQQGGVQKQVRREIEIQSNLRHPNVLRLYGHFQDSKRIFLILEFAGRGELYKHLRKEHRFPEWKAAQYIAQMAAALKYLHKKHVMHRDIKPENILVGIHGEIKISDFGWSVHAPNNRRQTMCGTLDYLPPEMLKPGSQDNYYSEKVDLWSLGVLTYEFLVGEAPFEDTPVMTQRRIARADMTVPSFVSPEAKDLIKRLLVLDPEKRISLDEIQKHPWILKHCLKDDRATKRSSGSSKEGKA

SEQ ID NO: 11377 - DNA, 1266 bp, Coprinopsis cinerea okayama7#130
  CDS (1)..(1266)
atgactacagcatcgataaactctgtgacacggcaaatcgccgctctcgagatttccaacaagaaacaaggaggagggattagcagctcctcatcgtcatcatcttccttccgaccaggacacacgaagcaacccagcggcacgaacgtagcaaaacttctcactaaattcagcgctcccaatccctacaccaactcgtctaaaccgaccgcttcgtcctcattgcgaaacctaaaccaaaaccaggcttctggaacctcgtcgtcgtcgtcgtcgtcgtcgtcgtcgcagcaatcgtccaagtcgtcctcgagaagccagaccacgcagccgcttgatatcggaagctatgacgggggtttggaaaccgagaacgagaagcgaggggagaaagtgtacggcgaagccgctcaagacctcgcattagactctagcgtcaatgggaaaaaccccacccgcgaatggacgctgcacgactttgaaatggggcgtcccctgggcaaaggcaaattcgggcgcgtctacatggtccgcaccaaatgcgaaccgcggtacatcctcgccctcaaaaccctctacaaatccgagatcgtccagtcccgcgtcgagaagcagatccgtcgtgaaattgaaatccagcagaacttgcgacacccgaacgtactccggttgtatggctacttccacgacgagaagcgtatctttttgatgttggagtttgctgggaagggagagttgtacaagcaattgtccaagtatggtcatttctcggagcggaggagtgcgaggtatatctatcagatggcggatgcgttgatttatctgcatagcaagcacgttattcatcgggatatcaagccggagaacttgctgcttgggattaatggcgagctgaagattggagattttgggtggagtgtgcatgcgccggggaataggaggatgacgctgtgtgggacgttggattatttgccgccggagatggtggaggggaaggagcatagtgagcgggtggattattgggcgctgggtgttctcacttatgagttcttggttggtgctccgccgtttgaagataagaacagtgtgaataatacctatcgccgtattgcgagagtcgatctcaagttcccttcctacctctctcctgaagtcaaggacctcattgccaagctcctgcaacacgacccttccaaacgtcttgctctgaccgaagtcatccgtcatccctggctcatcaagcaccgcgctatcccgacctcataa

SEQ ID NO: 11378 - protein, 421 aa, Coprinopsis cinerea okayama7#130
MTTASINSVTRQIAALEISNKKQGGGISSSSSSSSSFRPGHTKQPSGTNVAKLLTKFSAPNPYTNSSKPTASSSLRNLNQNQASGTSSSSSSSSSSQQSSKSSSRSQTTQPLDIGSYDGGLETENEKRGEKVYGEAAQDLALDSSVNGKNPTREWTLHDFEMGRPLGKGKFGRVYMVRTKCEPRYILALKTLYKSEIVQSRVEKQIRREIEIQQNLRHPNVLRLYGYFHDEKRIFLMLEFAGKGELYKQLSKYGHFSERRSARYIYQMADALIYLHSKHVIHRDIKPENLLLGINGELKIGDFGWSVHAPGNRRMTLCGTLDYLPPEMVEGKEHSERVDYWALGVLTYEFLVGAPPFEDKNSVNNTYRRIARVDLKFPSYLSPEVKDLIAKLLQHDPSKRLALTEVIRHPWLIKHRAIPTS

SEQ ID NO: 11379 - DNA, 915 bp, Brugia malayi
  CDS (1)..(915)
atggcaaatttttcatcaactaatattttacacactgttttgaataaacagagcacttgcctagaagttggaaaggaagaatcggaatttctagttcccaaaagcccattttatgaccgagaatttcgattgagtgacttcgagattggtagaccattaggaaaaggcaaatttggtaatgtctatctggctcgcgtcaaaggcatcaattttatcgtcgctttgaaaattctgttcaaatcgcaacttatcaagaacagcgtggaacatcaattacgtcgtgaaattgaaattcaagctcatttacgacatcctcatattctacgtatgtacaattatttttatgatgaaaaacgtatttacttgatactagaatatgcagctggaggtgagctttataaggagttgcagaagtgcggccatttcgacgaagaacgtactgccaagcttatgtttcaaatggctgatgcactgtcttactgtcacgataaaaaagttatacatcgtgatatcaagcctgagaacctacttttgggcatgtttggtgaactgaagattgcagactttgggtggagtgttcatgccccatcttccaggcgagaaacgatgtgcggtactttggattatttgccacccgaaatggtacgaggagagaaacatgatgataaggtcgatctatggtcactgggtgttctctgctatgaactacttgttggtagaccgccgtttgaaagtaaaactcatgatgaaacttataaacttattgccaacgtcaaatataagtttccgagtcatgtttctgaaggagccaaggacttgatcactaaattattggtaaaaaatgccgctgcacgccttcctttgaaagacgttatggagcatccatggattcgtcaatatatttgcaaagaatga

SEQ ID NO: 11380 - protein, 304 aa, Brugia malayi
MANFSSTNILHTVLNKQSTCLEVGKEESEFLVPKSPFYDREFRLSDFEIGRPLGKGKFGNVYLARVKGINFIVALKILFKSQLIKNSVEHQLRREIEIQAHLRHPHILRMYNYFYDEKRIYLILEYAAGGELYKELQKCGHFDEERTAKLMFQMADALSYCHDKKVIHRDIKPENLLLGMFGELKIADFGWSVHAPSSRRETMCGTLDYLPPEMVRGEKHDDKVDLWSLGVLCYELLVGRPPFESKTHDETYKLIANVKYKFPSHVSEGAKDLITKLLVKNAAARLPLKDVMEHPWIRQYICKE

SEQ ID NO: 11381 - DNA, 1323 bp, Podospora anserina DSM 980
  CDS (1)..(1323)
atggcctcgagaacattggagtcccgcttcgagcggatgtctgtcaaggacgaaaacgacccgtttgagaccattgggacgacaacgacatcgacatatcagaaggcaaagaccgtcaccgcctcctctgcctcacaactctcccatagcagcagccggcccaacctcttcaaagtcgccctccagccccaaaacgccaacacggtaacagccaccgtcactctcccctcccaggccgcccagcgcaagcaacccacgaccagcgcttccaccgccatccccaacaagcagcgggaaaaggacaccaccaccaccaccaacaacaacaacaacaacgaaatcccctccccaaccaaacacaaatccaccacctctctatcctcccgccagtcagacgaactcgtcctcaccaacgacggccgctcctcctcgtcttccacctcctcctacgtcgacgcccctctaataccaaaacaattccacctcggcatgtttgaaatcggccgtcccctcggaaaaggcaaattcggccgcgtctacctcgcccgcgagagaacatcctccttcatctgcgctctgaaggttctctacaaatccgaactgcaacacggcaccggcgtggaaaaacaagtccgccgcgaaatcgagatccagtccaacctccgacacccaaacatcctcaagctctacggccattttcacgacagcaagcgaatttttttgatattggaattcgccggcaagggcgagctgtacaagcacctacagaaggaaagtcggttccccgagtggaaagcggcgcagtatatcgcgcaaatggcgtctgcgctgaggtatctgcacaggaagcatgtgattcatagggatatcaaacccgagaacatcctgatgggcattcacggggagattaagatttcggactttgggtggtcagtgcacgcgccgaataataggcggaagacgctttgcgggacgttggattatttaccgcccgagatgatcaagtcgggcagtaaggataattggtataatgaaaaggtggatttgtggagtttgggggtgttgacgtatgagtttttggtgggggaggcgccgtttgaggacacgccgattatgacgcagaagaggatcgcgagggcggatatgacgattcctgagtgggttagtaaggaggcgagggatttgattaagaagctgctcgtactggatccggaaaagcggttgccgttggaggaggtgcagaatcatccttggattatcaagcattgcgtcaagggggagagggcgtcgaatcgggagaagttgagttttgggaagtcttga

SEQ ID NO: 11382 - protein, 440 aa, Podospora anserina DSM 980
MASRTLESRFERMSVKDENDPFETIGTTTTSTYQKAKTVTASSASQLSHSSSRPNLFKVALQPQNANTVTATVTLPSQAAQRKQPTTSASTAIPNKQREKDTTTTTNNNNNNEIPSPTKHKSTTSLSSRQSDELVLTNDGRSSSSSTSSYVDAPLIPKQFHLGMFEIGRPLGKGKFGRVYLARERTSSFICALKVLYKSELQHGTGVEKQVRREIEIQSNLRHPNILKLYGHFHDSKRIFLILEFAGKGELYKHLQKESRFPEWKAAQYIAQMASALRYLHRKHVIHRDIKPENILMGIHGEIKISDFGWSVHAPNNRRKTLCGTLDYLPPEMIKSGSKDNWYNEKVDLWSLGVLTYEFLVGEAPFEDTPIMTQKRIARADMTIPEWVSKEARDLIKKLLVLDPEKRLPLEEVQNHPWIIKHCVKGERASNREKLSFGKS

SEQ ID NO: 11383 - DNA, 1203 bp, Pyrenophora tritici-repentis Pt-1C-BFP
  CDS (1)..(1203)
atggccgacgtcgcaaaccttgaggctgcctttgagcgcaccaccatcaacgatgagaatgatgagcaaatcgtctctactacggcgtaccacaaggcaaagcctgcggtagctggtctatcgtcatcacaatccgccgccaaccgcatgaagctgccccatcagatacccctgcaaaagattgcaacacagaatgcaaagactgcaaacattgccaaagtcacaatctcagcaagcaccagccgaccctctgagcacaacccatcgcatcgccgcacccttaccgattcggccgtctacaccgtcccttccaacccatcaacacccaaacaatggcatctcggcatgttcgagattggcaagcccctcggcaagggaaagtttggtcgcgtctaccttgccaaagagcgctcatcaggcttcgtttgtgccttgaaggtcctccacaagtctgagctccagcaaggcaaggtcgagaagcaggtgcgacgagagatcgagattcaatcccaccttacccaccccaatatcctcaagctttttggtcacttccacgatgccaaacgcatcttccttattctcgaatttgccggcaagggagaactgtacaagcatctccgccgcgaacaacgcttcccggaatggaaagctgcccagtacattgcgcaaatggctgcagctctcaagtacctccacaagaagcacgtcatgcaccgcgacatcaagcccgagaacatcctcgttggtattcacggcgagatcaagatttccgactttggctggtcggtacacgcacccaacaaccgccgtaacaccatgtgcggaactctcgactacctgcccccggagatgcttcgcggtggcggcaaggacaacttctactctgagaaggttgacctgtggagtttgggtgtcctgacgtatgagttccttgtcggtgaagcgccattcgaggacactcaggtcatgacacagcgcaagattgcaaggggagaatacacagtaccgagctttgtcagctccgaggcgcgggaccttatcaagagattgttggtgctcgacccagagaagcgtatcgcgcttgaggatgttgaggtacacccatggattgtcaagcactgcaaaggcagcacgcgggcatacgagcgtacgtctgctggcaagggccgcagtagctcagacgagaccaacgactcgtactaa

SEQ ID NO: 11384 - protein, 400 aa, Pyrenophora tritici-repentis Pt-1C-BFP
MADVANLEAAFERTTINDENDEQIVSTTAYHKAKPAVAGLSSSQSAANRMKLPHQIPLQKIATQNAKTANIAKVTISASTSRPSEHNPSHRRTLTDSAVYTVPSNPSTPKQWHLGMFEIGKPLGKGKFGRVYLAKERSSGFVCALKVLHKSELQQGKVEKQVRREIEIQSHLTHPNILKLFGHFHDAKRIFLILEFAGKGELYKHLRREQRFPEWKAAQYIAQMAAALKYLHKKHVMHRDIKPENILVGIHGEIKISDFGWSVHAPNNRRNTMCGTLDYLPPEMLRGGGKDNFYSEKVDLWSLGVLTYEFLVGEAPFEDTQVMTQRKIARGEYTVPSFVSSEARDLIKRLLVLDPEKRIALEDVEVHPWIVKHCKGSTRAYERTSAGKGRSSSDETNDSY

SEQ ID NO: 11385 - DNA, 918 bp, Ciona intestinalis
  CDS (1)..(918)
atgagttctgccaacaatgaaaacaaagctcctgagaaagcttcaacatctggtcgtgctactgctagttccgccaaagataatgcaagtgacacttggtcacttaaaaactttgacattggcaaaccactgggacgaggaaagtttggcagcgtgtaccttgctagagagaaaaagagcaagtttatcgttgcactgaaagtgctgtttaaatcgcaactcatgaaaagtaatgtggagcatcaattacgaagagagattgaaattcagtctcatttgcgtcatccacacattctgcgactttacggttactttcacgatgagacgagagtgtatctgatcctggagtatgcatctcgtggggaaatgtacaaggagctgcagaagcagggcaagtttacagaggagatgtccgctacgtacatagccgagctagcagatgcgctcaactactgccacagcaaacaagtcattcatcgtgacatcaaaccggagaacttgttgatgggtcttcgaggggaattgaagattgctgattttggttggtctgtgcatgctccgtcctctaaacgccaaactctttgtggtacgcttgattacctcccaccagagatgattgaagcaaaagatcatgatgctaacgtcgacctgtggacacttgggattctatgctatgagtttcttgttggcaaaccaccttttgaaacaaaaagcacacaagaaacatacctcagaattacatcactgaaatattcattccctccccatgtatcagagggagctcgtgatcttattcgtcgcctcttaaagttggaaccacgacaccgacttccactggaaagtgtaatggctcacccctggatcaaagccaatgccaaagtacataagtttggaccagatggtcgacctatggactga

SEQ ID NO: 11386 - protein, 305 aa, Ciona intestinalis
MSSANNENKAPEKASTSGRATASSAKDNASDTWSLKNFDIGKPLGRGKFGSVYLAREKKSKFIVALKVLFKSQLMKSNVEHQLRREIEIQSHLRHPHILRLYGYFHDETRVYLILEYASRGEMYKELQKQGKFTEEMSATYIAELADALNYCHSKQVIHRDIKPENLLMGLRGELKIADFGWSVHAPSSKRQTLCGTLDYLPPEMIEAKDHDANVDLWTLGILCYEFLVGKPPFETKSTQETYLRITSLKYSFPPHVSEGARDLIRRLLKLEPRHRLPLESVMAHPWIKANAKVHKFGPDGRPMD

SEQ ID NO: 11387 - DNA, 1020 bp, Hydra magnipapillata
  CDS (1)..(1020)
atgaacgcattaaaagataataattttcagaattcgtctaaaggaactgtaaaaacaatgcttcaaaaatctgacaaaccaagtagtttagaaaaagaaaatcaagatcaaaaagaacccaaaaatcaaagtaaagaaaatcctcctccgcctattgataaatgttggtctctatctgattttgatattggcaaaccacttggaaaaggtaaatttggaagtgtctaccttgcaagagaaaaacagagtcattttattgttgcattaaaagtcttgtttaaatcacaacttatgaaagcagctgttgagcatcaattgagaagagaaattgaaatacaatcacacttaaaacatccacacatattaagattatatggctacttctatgatgcgaagcgcgtgtttcttatactggagtatgcaccacaaggagagttatataaacatctaacaaaatcagaacgttttaatgaggccaagtcagcaacatatatttcccagttggcttcagctcttgaatattgtcattcgaagaaagtaatccatagagatattaagccagaaaatcttttacttggcatgaagggcgagttaaaaatatctgattttggttggtctgtacatgctccttcatcaaggcgtacaactctttgtggtaccttagactatttaccacctgaaatgattgagggaaaagttcatgatgaaaaagttgacttatggagtgttggtgttttatgttatgaatttttagttggaaaaccaccttttgagacagaaagccatgaccatacgtatcagctgatttcttctgtcaaatactcatttccagactatgtaagttctggcgcccgcgatcttatatcccagctacttcgcaagaaaccatcagatagactaccgttagcagatgtcctaaagcatccatggatccaacaacattcttctatgtttaataaacaaaaggtttcagtgaaccagacacctacaacttcagtctcgtctctttctagttcctga

SEQ ID NO: 11388 - protein, 339 aa, Hydra magnipapillata
MNALKDNNFQNSSKGTVKTMLQKSDKPSSLEKENQDQKEPKNQSKENPPPPIDKCWSLSDFDIGKPLGKGKFGSVYLAREKQSHFIVALKVLFKSQLMKAAVEHQLRREIEIQSHLKHPHILRLYGYFYDAKRVFLILEYAPQGELYKHLTKSERFNEAKSATYISQLASALEYCHSKKVIHRDIKPENLLLGMKGELKISDFGWSVHAPSSRRTTLCGTLDYLPPEMIEGKVHDEKVDLWSVGVLCYEFLVGKPPFETESHDHTYQLISSVKYSFPDYVSSGARDLISQLLRKKPSDRLPLADVLKHPWIQQHSSMFNKQKVSVNQTPTTSVSSLSSS

SEQ ID NO: 11389 - DNA, 1041 bp, Schizosaccharomyces japonicus yFS275
  CDS (1)..(1041)
atgtcagaatcaaagctcgttgactcgttgaaccggctctcggtaaataatgggagcacagttgcgtctggcagacagcaattactgcgtcttgctgtttccaaccaaatgcacgcaaacaacaattcgtcgaccagtgcagacgctttgagagaacgccaagaaagacactactcgctttcatccgacggaaacaacaacagcagtaaaccgttgcggaattttcatttaggaatgttcgaaattggcaaacctttgggaaaaggaaagtttggtcgcgtctacttggccaaggagaagaaaacaggctatgtggtcgccttgaaaacacttcacaaggaagaattggtgcactcaaaggtggaacgtcaagtacggcgcgaaattgaaattcaatcgaacttgcgacacaaaaatattcttcgtctgtttggtcactttcatgacgagaagagaatcttcttaattcttgaatttgccggccgtggagagttgtacaagcatctccgtcgccaacaacgcttttcggaggagttgtcggcaaagtatattttccaaatggctcaggcgttagcctacttgcacaagaaacacgttattcatcgagacatcaaacccgaaaacatcttgttgggcattgacggcgagatcaagctttccgatttcggttggagtgttcatgcaccttcgaatcgcagaacgactttgtgtggaacgctggactacctgccacccgaaatggttgaaggaaaggagcatggtgcgaaggttgacttgtggtcgttgggtgtgcttacatacgagtttctcgtaggcgcacctccctttgaagacatatctggccacagtgcaacatacagacgtatagccaaggtagatttgaagttcccaagcttcatctcagccgaggcaaaagacttaatctctcggctcttacaacacagtcccgagaaacgtttgtccctggaccaagtcatgcgtcatccttggattcttaaacataaaaacaactgggaccgaccgggtgttgatccccagtga

SEQ ID NO: 11390 - protein, 346 aa, Schizosaccharomyces japonicus yFS275
MSESKLVDSLNRLSVNNGSTVASGRQQLLRLAVSNQMHANNNSSTSADALRERQERHYSLSSDGNNNSSKPLRNFHLGMFEIGKPLGKGKFGRVYLAKEKKTGYVVALKTLHKEELVHSKVERQVRREIEIQSNLRHKNILRLFGHFHDEKRIFLILEFAGRGELYKHLRRQQRFSEELSAKYIFQMAQALAYLHKKHVIHRDIKPENILLGIDGEIKLSDFGWSVHAPSNRRTTLCGTLDYLPPEMVEGKEHGAKVDLWSLGVLTYEFLVGAPPFEDISGHSATYRRIAKVDLKFPSFISAEAKDLISRLLQHSPEKRLSLDQVMRHPWILKHKNNWDRPGVDPQ

SEQ ID NO: 11391 - DNA, 849 bp, Branchiostoma floridae
  CDS (1)..(849)
atgaagagttggaagctggaagattttgacatcggccggccgctgggcaagggcaagttcgggaacgtttatctggcgagagagaaaaactccaagttcatcgtagcactgaaggttctgttcaagtcccagctgatgaaggcaggtgtcgaacaccagctgcggcgggagatagagatccagtctcacctcagacacccccacatcctgcggctgtacgggtatttctacgacgacacgcgggtttacctgatcctggagtacgccccgcgtggcgagctgtacaaggaactacagaagcaagtccgcttcgacgagagaagatccgccacgtacatcgcccagctggcggatgcactgaagtactgccactctaagaaagtgatccaccgagacatcaagccggagaacctgctgctgggtctgaagggagacctgaagatcgcagacttcggctggtcggtccacgcgccctcctcaagacgtgcgacgctgtgcggaacgctggactacctccctccggagatgattgaagggaagatgcacgatgagaaagtcgacctgtggagtctgggcgtgctctgctacgagttcctggtgggcaagccgcccttcgaggccgagggccacagcgaaacctacagacggatatcaaaggttgacctgagatttccgccccacgtgacctctggagcacgagatttgatatcaaagctgctgcgccacaacccaatgctgcggctgccactggacagcgttctcagccacccctggataaaggacaacgcagccacgcaggccgagtccacacccgcacaccccacacacgcctcccacaccaagtcatga

SEQ ID NO: 11392 - protein, 282 aa, Branchiostoma floridae
MKSWKLEDFDIGRPLGKGKFGNVYLAREKNSKFIVALKVLFKSQLMKAGVEHQLRREIEIQSHLRHPHILRLYGYFYDDTRVYLILEYAPRGELYKELQKQVRFDERRSATYIAQLADALKYCHSKKVIHRDIKPENLLLGLKGDLKIADFGWSVHAPSSRRATLCGTLDYLPPEMIEGKMHDEKVDLWSLGVLCYEFLVGKPPFEAEGHSETYRRISKVDLRFPPHVTSGARDLISKLLRHNPMLRLPLDSVLSHPWIKDNAATQAESTPAHPTHASHTKS

SEQ ID NO: 11393 - DNA, 846 bp, Vitis vinifera
  CDS (1)..(846)
atgcgtgaagaaccctctcaaaaacagcagaaacaatggtctttagacgacttcgagatcggaaaacctctcggcagaggcaaattcggcagagtctatctcgcccgagaaatcaagagcaagtatgtagtggcattaaaggtgatattcaaggcgcagattgagaagtacaggcttcatcaccagctgaagagagagatggagattcagaccagtctttgtcacccaaacgtactgcgtctctatggttggtttcatgattccgagagaatctttttgattcttgaatactgttatgggggagagctctatagggagttaaggaagactggttatctcactgaaaagcaagccgccacgtacattgcaagcctcacacaagcattagcatactgccatgagaagcatgtgattcacagggatatcaagcctgagaatttgttgctagatcacgagggtcgactgaaaattgcggactttggatggtctgtacaatcaacaaacaagagacgaaccatgtgtggaactttggactatcttgcaccagaaatggtggagaacaaagctcatgactatgcagttgataactggactctgggaatcctatgttatgagttcctgtatggtgtccctccatttgaggcagaaagccagagtgatacatttaaacggataatgaaggttgacctgagcttcccttccaacccccatgtctcagccgaagctaaaaatctcattagccggcttctggtgaaggattcttcaaaaaggctctctcttcagaagatcatggagcatccttggataatcaagaatgcaaatcctacgggtacctgcaacaaatag

SEQ ID NO: 11394 - protein, 281 aa, Vitis vinifera
MREEPSQKQQKQWSLDDFEIGKPLGRGKFGRVYLAREIKSKYVVALKVIFKAQIEKYRLHHQLKREMEIQTSLCHPNVLRLYGWFHDSERIFLILEYCYGGELYRELRKTGYLTEKQAATYIASLTQALAYCHEKHVIHRDIKPENLLLDHEGRLKIADFGWSVQSTNKRRTMCGTLDYLAPEMVENKAHDYAVDNWTLGILCYEFLYGVPPFEAESQSDTFKRIMKVDLSFPSNPHVSAEAKNLISRLLVKDSSKRLSLQKIMEHPWIIKNANPTGTCNK

SEQ ID NO: 11395 - DNA, 882 bp, Vitis vinifera
  CDS (1)..(882)
atggcgatcgccgcagagactcaacctcaggagaaggcttcttcagatgttccagcagtggagaaaaaaaggtggaccctaaatgactttgacattggaaagcccctggggcgaggaaagttcggtcatgtctatttggcgagggaaaagagaagcaatcatattgtggccctaaaagtgctcttcaagagccaactgcaacagtctcaggttgagcatcagcttcgccgggaagttgaaatacaaagtcatcttcgacaccccaatatcttgcgcctttatgggtacttttatgatcagaaacgagtgtatttgatattagaatatgcggccaaaggtgaactctacaaggaactacagaagtgtaaatacttcagtgaaaggcgtgctgctacttacgttgcttcattagctcgggctctcatatattgccatgggaagcatgtaatacacagagacatcaaacctgagaacctgttagttggggcacagggtgaacttaagattgcagattttggatggtcagtgcacacatttaaccgcagaaggaccatgtgtggcacactggactaccttccacctgagatggtggagagtgtggagcatgatgctagtgtggacatatggagccttggtgtactttgctatgagtttctttatggggttcctccttttgaggctaaggaacactcagacacctacagaaggattgtgcaagttgatttaaagttccccccaaaaccaatagtctcttctacagcgaaggacctcatcagtcagatgctggtgaaggattcttcgcagcggctcccactacacaagctccttgagcatccctggatcgttcagaatgcagatccctctggtgtctatagggcttga

SEQ ID NO: 11396 - protein, 293 aa, Vitis vinifera
MAIAAETQPQEKASSDVPAVEKKRWTLNDFDIGKPLGRGKFGHVYLAREKRSNHIVALKVLFKSQLQQSQVEHQLRREVEIQSHLRHPNILRLYGYFYDQKRVYLILEYAAKGELYKELQKCKYFSERRAATYVASLARALIYCHGKHVIHRDIKPENLLVGAQGELKIADFGWSVHTFNRRRTMCGTLDYLPPEMVESVEHDASVDIWSLGVLCYEFLYGVPPFEAKEHSDTYRRIVQVDLKFPPKPIVSSTAKDLISQMLVKDSSQRLPLHKLLEHPWIVQNADPSGVYRA

SEQ ID NO: 11397 - DNA, 852 bp, Populus trichocarpa
  CDS (1)..(852)
atggcagaagacaacaaaaagtcagagccgcggcgaaggggatggtcgatagccgacttcgagatcggaaaacccttagggagagggaagttcggccgggtctatgtagccagggaagtgaagagcaagtacatagtggcattgaaggtgattttcaaggaacaaatcgacaagtacaacattcatcatcaattgaagagggaaatggatattcaaaccagtctcagtcaccctaacattctccgtctctacggttggtttcacgatgaccaacgcgtcttcatgattcttgaatacgctcacggcggtgaactttttaaagagcttagaaagtgcggttatctctctgagcaaaaagccgccacgtatgttgccagtctggcgaatgcattggcgtattgtcatgagaaggatgtgattcacagagatataaagcctgaaaatttgttgcttgatcacgagggtcgactgaaaattgcggatttcgggtggtctgtgcaatcgaggagcaaaagacacactatgtgtggaactttggattacttggcaccggaaatggtggagaataaggctcatgattacgctgttgataactggactttgggaattctttgttatgagttcctctatggggctcctccctttgaggctgagagtcagcgtgatacgttcagaaggattgtgaaggttgatcttacttttccttccactcctcctgtctctgcagaagcaaagaacctcatcacccggcttttggtcaaggactcttcaaagaggctgtctcttcagaagatcttggagcacccatggataatcaagaatgcaaatccaatgggcacctgtgataactag

SEQ ID NO: 11398 - protein, 283 aa, Populus trichocarpa
MAEDNKKSEPRRRGWSIADFEIGKPLGRGKFGRVYVAREVKSKYIVALKVIFKEQIDKYNIHHQLKREMDIQTSLSHPNILRLYGWFHDDQRVFMILEYAHGGELFKELRKCGYLSEQKAATYVASLANALAYCHEKDVIHRDIKPENLLLDHEGRLKIADFGWSVQSRSKRHTMCGTLDYLAPEMVENKAHDYAVDNWTLGILCYEFLYGAPPFEAESQRDTFRRIVKVDLTFPSTPPVSAEAKNLITRLLVKDSSKRLSLQKILEHPWIIKNANPMGTCDN

SEQ ID NO: 11399 - DNA, 882 bp, Populus trichocarpa
  CDS (1)..(882)
atggcgattgctgcggaggcccagccccaagagaaggcgagaacagatgtatcaggggcagagaagaagagatggacgcttaacgattttgatatgggaaagccacttgggcgtggaaagtttggtcatgtttacttagccagagaaaaaaggagcaatcatattgtggctttgaaggttctgtttaagagtcagttgcaacagtcacaggttgaacatcagctccgtcgcgaagttgaaattcagagtcatcttagacatcccaatatattgcgcctttacggttacttttatgatcagaaacgagtttatttgatattagaatatgcagccaaaggtgaactctacaaagaattgcagaggtgtaaatactttagcgaaagacgtgctgctacttatgttgcgtcattagccagggcactgatttattgtcacagcaagcatgtgatacacagagacatcaagccagagaacctgttaattggtgcacagggtgagctcaagattgcagactttggttggtcagtgcacacttttaaccgcaggcgtacgatgtgtggtacattggactacctcccaccagagatggtgcaaagtgtagagcatgatgctagtgttgatatatggagcctgggtgttttatgctatgagtttttatatggcatccccccgtttgaggccaaggaacactcagacacatacaaaaggattgtgcaagtggatctgaagttccctcctaaaccaattgtctcttctgctgcaaaggaccttattagtcagatgcttgtcaaggattctgttgagcgactaccattacataagctgcttgagcatccctggatcgttcaaaatgttgatccctctggcatctttaggggttga

SEQ ID NO: 11400 - protein, 293 aa, Populus trichocarpa
MAIAAEAQPQEKARTDVSGAEKKRWTLNDFDMGKPLGRGKFGHVYLAREKRSNHIVALKVLFKSQLQQSQVEHQLRREVEIQSHLRHPNILRLYGYFYDQKRVYLILEYAAKGELYKELQRCKYFSERRAATYVASLARALIYCHSKHVIHRDIKPENLLIGAQGELKIADFGWSVHTFNRRRTMCGTLDYLPPEMVQSVEHDASVDIWSLGVLCYEFLYGIPPFEAKEHSDTYKRIVQVDLKFPPKPIVSSAAKDLISQMLVKDSVERLPLHKLLEHPWIVQNVDPSGIFRG

SEQ ID NO: 11401 - DNA, 1194 bp, Magnaporthe grisea 70-15
  CDS (1)..(1194)
atggcaacgaaagctatgcaactcgaagagtgcttcgagcacctgaatgttaacgatgagaacgaccacggtgacagattggtacaaaagtccaagatctccatgtctacagcacaaatatctcatggcagttcgagaccgaacctgttcaaggtcgccctacaatcgcaaagcgcaaacacagtcacgtcggtgacactcccatcccaggcagcccaacgaaaaatggccccaccacccaagagcagagagcccccttcacccagcaaacacaaaaaggattcagtctcgtccagcgtagatgagctcgcgaatgaggaagttgaagcttcggccccgagagtacctaaggaattccaccttggtatgttcgagatcggacggcctctgggcaagggaaagtttggccgtgtatacctcgcccgcgagcgtaccaccggcttcatctgtgcactcaaggtcctgtacaaaaaggagcttgagtctggcagtgttgaaaaacaggtccgacgagaaatcgagatccaaacaaatctctgccatccaaacattctgaagatgtatggccatttccatgacaacaaacggatattcctcatcctcgaatttgcaggcaaaggtgaattgtacaagcatttgcgcaaagaaaaccgctttccggagtggaaggccgcccaatatgtcgcccaaatggccagcgccctcaaatacctccaccggaaacacgtcatccaccgggatatcaagcccgagaacatcctagttggccttcacggggagctgaagatttcggattttggttggagcgtgcacgctcccaacaaccgtcgcaagacgctttgtggaactctcgactatctcccaccagagatgatcaagtctggcaacaaggacaacacttatgacgaaaaggttgacctttggagcttgggcgtgctgacctacgagtttgtcgttggcgaggcgccctttgaggatactccggtcatgacccaaaggaggattgccagggccgatatgactatcccgtctttcgttagcccggagtgccgtgatttgatcaagaaactgttggttcttgaccctgtcaagaggctctctttggacgctgttcaaaagcacccttggatcatcaagcactgcgtcaagggcgagcgtgccaccaaccgcgagaagggccgcggtagcgactaa

SEQ ID NO: 11402 - protein, 397 aa, Magnaporthe grisea 70-15
MATKAMQLEECFEHLNVNDENDHGDRLVQKSKISMSTAQISHGSSRPNLFKVALQSQSANTVTSVTLPSQAAQRKMAPPPKSREPPSPSKHKKDSVSSSVDELANEEVEASAPRVPKEFHLGMFEIGRPLGKGKFGRVYLARERTTGFICALKVLYKKELESGSVEKQVRREIEIQTNLCHPNILKMYGHFHDNKRIFLILEFAGKGELYKHLRKENRFPEWKAAQYVAQMASALKYLHRKHVIHRDIKPENILVGLHGELKISDFGWSVHAPNNRRKTLCGTLDYLPPEMIKSGNKDNTYDEKVDLWSLGVLTYEFVVGEAPFEDTPVMTQRRIARADMTIPSFVSPECRDLIKKLLVLDPVKRLSLDAVQKHPWIIKHCVKGERATNREKGRGSD

SEQ ID NO: 11403 - DNA, 1032 bp, Gibberella zeae PH-1
  CDS (1)..(1032)
atggccgcagacgactctcctacgtttgaagagcactttagccgcctgtctattgatcacaaatcagtgggatcccagagtaaacgcgttcccaagaccaagatcccacaatcacagcccgttcctggacctgctcaaccgaaatgtctgcttcctgtcaaaggacctgtcgttgcaaacagagtagacacaccgactccccataaagaccaagatacaaactcaccatcgccttcatctcctcaaaagcccaccacaaaatcatctactacgaaaagtgctacactctacaaacatcttcaccttggcatgttcgaaatcgggcgaccgatgggaaaaggcaaattcggtcgcgtatatctcgcacgggagcgcagctcaggtttcatctgcgccctcaaagttctatacaagactgaattacgacaatcccgaatggaaagtcaagtacgccgagaaatcgagatccagaccaacctccgtcaccccaacatcgtccaactatacagccatttccacgacagcaaacgaatcgttctcgtccttgaatttgccgccaaaggcgaactttacaaacacctacaaaaagaaacccggtttacagagagaaaggcggcccgattcatcgctcaagttgtatcagcgctgcaatatctgcaccgaaagaatatcattcatcgagatattaaacctgagaatattcttgtcggtatgcatgatgagctgaagatgagcgactttggctggagtgtccattcaccttccaaaaggcgagagactatgtgcggcacgctagactaccttcctcctgagatgatcaaattaggtgcagtagacgctggcaggttctatgacgagaaggtcgacgtttggagcttgggggtgttgacctatgagtttctggttggagtgccaccatttgaagatacgccagtcaggacacaacgacgaatcgccagagcagacatgcagattccagatttcataagttcaaaggcaaagcaccttatcaaaagtgcatgttctctttag

SEQ ID NO: 11404 - protein, 343 aa, Gibberella zeae PH-1
MAADDSPTFEEHFSRLSIDHKSVGSQSKRVPKTKIPQSQPVPGPAQPKCLLPVKGPVVANRVDTPTPHKDQDTNSPSPSSPQKPTTKSSTTKSATLYKHLHLGMFEIGRPMGKGKFGRVYLARERSSGFICALKVLYKTELRQSRMESQVRREIEIQTNLRHPNIVQLYSHFHDSKRIVLVLEFAAKGELYKHLQKETRFTERKAARFIAQVVSALQYLHRKNIIHRDIKPENILVGMHDELKMSDFGWSVHSPSKRRETMCGTLDYLPPEMIKLGAVDAGRFYDEKVDVWSLGVLTYEFLVGVPPFEDTPVRTQRRIARADMQIPDFISSKAKHLIKSACSL

SEQ ID NO: 11405 - DNA, 1182 bp, Gibberella zeae PH-1
  CDS (1)..(1182)
atggctacccgtaccattgaggcccgcttcgagcgcatgtcggtcaacgacgagaacgaccccataggcgatggatctaagctctacagcaagagcaaggtgcagactatctcttcgacatcaagtcatggtgcaaaccgccccaaccttttcaaggtcgctcttcaatcacaaagcagcaatgccaacgccgctgttatgctgccgtcccaggctgctcaacgaaaagtcaacaacccgcctccatctcctacaagaaaggccttgccttcttcatcgagaacgtcagatgaggtctccgaggaccgaaagtcagtcaccctgccggaacagatgagcgtgcccaaacagttccacctgggcatgtttgagattggtcgccctctgggtaagggcaagtttggacgagtctatcttgctcgagagagaacaacaggcttcatttgcgccctcaaggtcctccacaagaacgaactgcaggccggtcgagttgagaagcaggtccgccgagagatcgagattcagagcaacctgagacatcccaatattcttcagctatacggccacttccacgacagcaagcgagtgtttttgatcctcgagttcgccggcaagggtgagctgtacaagcatctccgaaaagagaaccggttcccggagtggaaggctgctcagtacattgcccagatggcatcagccttgcgctacctgcaccgaaagcatgttatccaccgagacatcaagcctgagaacatcttggttggtatccacggtgagatcaagatctcagatttcggatggagtgtgcacgcccccaacaaccgaaggaagaccatgtgcggaactctcgactacctgcccccagagatgatcaagcctggtacctccgataacttctacaacgaaaaggttgacctgtggagcttgggtgtcctgacgtatgagtttctcgtgggcgaagcgccctttgaggacacgccggtaatgactcaacgaaggattgctcgtgctgatatgtccatcccaacgtgggttagccctgaggctactgatctcatcaaaaagctacttgtgctggaccccgagaagcgaattcctcttgagcaaattcaacagcacccttggattatcaagcactgcgtcaagggtgaacgggcctcgaatcgcgaaaagggcctataa

SEQ ID NO: 11406 - protein, 393 aa, Gibberella zeae PH-1
MATRTIEARFERMSVNDENDPIGDGSKLYSKSKVQTISSTSSHGANRPNLFKVALQSQSSNANAAVMLPSQAAQRKVNNPPPSPTRKALPSSSRTSDEVSEDRKSVTLPEQMSVPKQFHLGMFEIGRPLGKGKFGRVYLARERTTGFICALKVLHKNELQAGRVEKQVRREIEIQSNLRHPNILQLYGHFHDSKRVFLILEFAGKGELYKHLRKENRFPEWKAAQYIAQMASALRYLHRKHVIHRDIKPENILVGIHGEIKISDFGWSVHAPNNRRKTMCGTLDYLPPEMIKPGTSDNFYNEKVDLWSLGVLTYEFLVGEAPFEDTPVMTQRRIARADMSIPTWVSPEATDLIKKLLVLDPEKRIPLEQIQQHPWIIKHCVKGERASNREKGL

SEQ ID NO: 11407 - DNA, 984 bp, Apis mellifera
  CDS (1)..(984)
atgtctacagaattgatgccaccacctaaattaccacctgtatcttctaaaacaacagaacgtataccaaatgcaactgatgatgagaaagaaaataaaattgtcaataatctagacattgaaaagaatctggaacaaaatattacaaataataagaaacaaactgataagaaatgggtattaactgattttgatattggtcgacctttaggaaaaggaaaatttggaaatgtttatttagctagagaaaagaaatcaaaattcattattgctatgaaagtattgtttaaagcacaaatacaaaaagccgatgttgaacatcaagttagaagagaaatagaaattcagacacacttaaggcatccaaatattttaaaaatgtatggttattttcatgatgataaaagaatatatttaattttggaatatgccccaaatggagaattattcaaggaattgaatgctcaacctgagaaacgttttgatgaaattagaacagcaacatatatatctcaattagcagatgctttaaaatattgtcatagtaaaaaagtgatacatcgtgatattaaacctgaaaatttattacttggtataaagggcgaattaaaagtagcagattttggatggtctgttcatgctccttcctctagaagaaatactctttgtggtactttagattatttaccaccagaaatgattaatggaaacacacatgatcatactgtagatttatggggacttggtgttctttgttatgaatgtttagtaggcatacctccatttttagctaaatcttataatgaaacatatatgaaaattaggaaagctcaatatacatttccagaatttttaagtgaaggtgctaaggatttaatatctaaattattaatagttgatccaggtcaaagattacctttagaagatgttttaagacatccttggattgtgcaaaatcgaacaacagaaccacatgtatcataa

SEQ ID NO: 11408 - protein, 327 aa, Apis mellifera
MSTELMPPPKLPPVSSKTTERIPNATDDEKENKIVNNLDIEKNLEQNITNNKKQTDKKWVLTDFDIGRPLGKGKFGNVYLAREKKSKFIIAMKVLFKAQIQKADVEHQVRREIEIQTHLRHPNILKMYGYFHDDKRIYLILEYAPNGELFKELNAQPEKRFDEIRTATYISQLADALKYCHSKKVIHRDIKPENLLLGIKGELKVADFGWSVHAPSSRRNTLCGTLDYLPPEMINGNTHDHTVDLWGLGVLCYECLVGIPPFLAKSYNETYMKIRKAQYTFPEFLSEGAKDLISKLLIVDPGQRLPLEDVLRHPWIVQNRTTEPHVS

SEQ ID NO: 11409 - DNA, 1239 bp, Debaryomyces hansenii CBS767
  CDS (1)..(1239): transl_table=12
atgtattgtcgtgtgtttacccatttctctctatatcggttatatacactcctggataacataaacataaacaagactaaccacaataagctgatcgggttacatcaacatagagtgaattatatgcctaggagtatgactgcgtcatcaagtcagcttaaacggatagagactcgtatagagagtttatcggaatcgttgtccaagtcgaatgcacgtaaaccacttggtaaatttcagctaaatacattcgataacaacaagatcaccaagctccaaaatgagaaagtgagacctctgaaaagctcccatataccagtcaaactgccaatacgaaagaaagggcattctccagcacaggtattacaaaatgagcgtatggatacaaaattgttgttacagaaattgccttcggcaagcagacatatgacattggatgattttgaaattggtaaagtacttggtaagggaaagctaggaaaagtgtactgtgttaaacataaaacatccggatatatagcagcattaaaggtaatggccaaaaaagaccttatagacttgaagttggaaaagaactttcgtcgggaaatcgaaatacaatcgaatctaattcatcccaaaatatcacggttatatggcttcttctacgaccataaaaacgtttatttgatattggaatactccattcacggtgagttgtaccatcatttaaaggttcagagaagattcaatgatgcaaccgcttcacattatatttatcaggtagcattggcactcgactatttacatacaaaacacatcattcatcgggatatcaaaccagaaaatatattgctatcaacagataactgcatcaagttgagtgattttggatggtcagtcaagagtctgcccagctccagtaccaaaagactaactatatgtggcacattggattacttgcccccagaaatgattgaatctaatgaacatgattacactgttgatatttggtctttgggtatcctttgctacgagtttctcgttgggaaacctccatttgaagaaattgataaaaactcgacctataaacgtattgctaaagttgatttaaaaatacctagcttcctcagcagtgaagccacagatttaattttaagattgttacaaaagtcacctaaaaagagaataacattagccgaagttatgaatcatccttggatcatgaataatcaacagtattggcctaatgaaaactaa

SEQ ID NO: 11410 - protein, 412 aa, Debaryomyces hansenii CBS767
MYCRVFTHFSLYRLYTLLDNININKTNHNKLIGLHQHRVNYMPRSMTASSSQLKRIETRIESLSESLSKSNARKPLGKFQLNTFDNNKITKLQNEKVRPLKSSHIPVKLPIRKKGHSPAQVLQNERMDTKLLLQKLPSASRHMTLDDFEIGKVLGKGKLGKVYCVKHKTSGYIAALKVMAKKDLIDLKLEKNFRREIEIQSNLIHPKISRLYGFFYDHKNVYLILEYSIHGELYHHLKVQRRFNDATASHYIYQVALALDYLHTKHIIHRDIKPENILLSTDNCIKLSDFGWSVKSLPSSSTKRLTICGTLDYLPPEMIESNEHDYTVDIWSLGILCYEFLVGKPPFEEIDKNSTYKRIAKVDLKIPSFLSSEATDLILRLLQKSPKKRITLAEVMNHPWIMNNQQYWPNEN

SEQ ID NO: 11411 - DNA, 1116 bp, Yarrowia lipolytica CLIB122
  CDS (1)..(1116)
atgtctatgaagcaattggagacttcaatgtcgagtgtctccctgcaagagaagaagcccactcgaataaagattgctctgcatcctcagtccaagagcgaacaaaatgagactgatcgagcatcaaaaattccaaccggacgaatcagcaccacacaaccacagacatactaccggcctactaaccttaccaaaactcccgccagccaggtgtctcgacggtcttcatacaccacagaccccccatcaccactgacgggcatcacggggttccgaaactattctctggacgactttgagattggcaaggctctcggtaagggcaaatttggaaaggtgtacctggtgaaggacaagaagaccgggttcgtatccgccctcaaatgcatggagaagaaggaactggtggagggcaacgtggagaagcagtttcgacgagaggtggagatccagtccaacctgcgacacacaaacgtgctgcggttgtttggccactttcatgacaaggaccgagtctacctcattctcgagtacgtcgtgcatggcgagctgtataagttgctgcgcaaccagaaacgattcaccgagagcacagcgtcgtcgtacatttatcagatgagcgaggcgctgctgtatttgcatgggaagaacatcatccacagagacatcaagcctgaaaacattctgttacacttcaacgacacaatcaaaatcagtgactttggctggtccgtgcatgctccttccaacagacgaagcaccctctgtggtaccatggactatcttcccccggagatagttcaatcgcggccctacgacaagaatgtcgacgtgtggtctttgggaattcttatgtacgaattcctgtgcggtgcccctccctttgaggagcccggaggagctcaggcaacctaccgacgaattgtcaagctggacctgcgaattcctccctacgtgtcagcagacgctgccgatctgatcaagcgaatgctcactctggaccctgccaagcgattcaagctcaaggacatgcataaacacccttggattgtccgacttcgacccacttggaagtacaaggtgcccaagaccgcctcccatgagaggtcagcctaa

SEQ ID NO: 11412 - protein, 371 aa, Yarrowia lipolytica CLIB122
MSMKQLETSMSSVSLQEKKPTRIKIALHPQSKSEQNETDRASKIPTGRISTTQPQTYYRPTNLTKTPASQVSRRSSYTTDPPSPLTGITGFRNYSLDDFEIGKALGKGKFGKVYLVKDKKTGFVSALKCMEKKELVEGNVEKQFRREVEIQSNLRHTNVLRLFGHFHDKDRVYLILEYVVHGELYKLLRNQKRFTESTASSYIYQMSEALLYLHGKNIIHRDIKPENILLHFNDTIKISDFGWSVHAPSNRRSTLCGTMDYLPPEIVQSRPYDKNVDVWSLGILMYEFLCGAPPFEEPGGAQATYRRIVKLDLRIPPYVSADAADLIKRMLTLDPAKRFKLKDMHKHPWIVRLRPTWKYKVPKTASHERSA

SEQ ID NO: 11413 - DNA, 1422 bp, Cryptococcus neoformans var. neoformans JEC21
  CDS (1)..(1422)
atgtcctcgcagaatgtttctggcctcatggccggtctatctctctatgctccgcagtctcccaaagggtccaaagcacaacaagcgggcaagacgcaggagtcatctcactcttctcagtctcagaataggcttcctccggtgctcaagaaatatatgaatccaggcctcgtccgccctcccaacagtggtcttgccaacaacagtcatccgtcttcctcttactcagatccatcatcgcgcggtccgctccttacccttgcgggtgtcaatgtctcatatcccaaatcgggcacagtctctcctatgaacaaatctaagggtgccgtcgggcaccattctgctcatgggatccacggaccagcccattcaacctcctcaagagcgatggcgtcttccatcaatcctggcgcttcgaaacatgctgtaacgactagttcttcacatatcactaatttagtttcggagaactgcaagagtctagaattggggcggtatgatggcggcttggaagaagatgaagcaaatcatggggatgccagtgggcctacagccaaaatgcttgagctgtctagtgtcagcgagggtgcaattcccttgtccctaccatcgttcactattggccgcccgttgggtaaaggtaaattcggtcgcgtataccttgctagatctaaggcacctcctcactttattgtcgccctcaaatgtctccataaggcagaaatcattcagggtaaggtagaaagccaggtgcggagagagatagaaattcagcaaaacttgaggcatcctaatattcttcgtctctatggatacttccatgacagcaaacgtatatttttggtcctagaattcgccgcaaagggggaattgtacaaacagctgtctagattaggcaggtttgacgaaaagaagagtagtcgatatatagctcagatggccgatgctttgtcttacttgcacagaaagcatgtcattcaccgagatatcaaacctgaaaatcttctcatcggtttgaatggcgagctcaaaatcggcgactttggctggagtgtgcatgcaccaagtaatcgccgcagcacgctttgtggaactcttgattatcttccccctgagatggtagagggcaaggagcatactgcagctgtcgatctgtgggcattaggtgtgctaacttacgagtttgtcgtcggtggacccccgttcgaggatctctctggaaacgccgctacataccggcgaataaggaatgttgatttacacgttccttcttgggtttctcctgaagccactgatctcatcaaaagactccttcggtacaaacctgaggaccgtttacctctgtcccaggtcatgattcacccgtggatcaagatgtatgagaagaaaagatcggcaagtaacgggatcaggaggtcataa

SEQ ID NO: 11414 - protein, 473 aa, Cryptococcus neoformans var. neoformans JEC21
MSSQNVSGLMAGLSLYAPQSPKGSKAQQAGKTQESSHSSQSQNRLPPVLKKYMNPGLVRPPNSGLANNSHPSSSYSDPSSRGPLLTLAGVNVSYPKSGTVSPMNKSKGAVGHHSAHGIHGPAHSTSSRAMASSINPGASKHAVTTSSSHITNLVSENCKSLELGRYDGGLEEDEANHGDASGPTAKMLELSSVSEGAIPLSLPSFTIGRPLGKGKFGRVYLARSKAPPHFIVALKCLHKAEIIQGKVESQVRREIEIQQNLRHPNILRLYGYFHDSKRIFLVLEFAAKGELYKQLSRLGRFDEKKSSRYIAQMADALSYLHRKHVIHRDIKPENLLIGLNGELKIGDFGWSVHAPSNRRSTLCGTLDYLPPEMVEGKEHTAAVDLWALGVLTYEFVVGGPPFEDLSGNAATYRRIRNVDLHVPSWVSPEATDLIKRLLRYKPEDRLPLSQVMIHPWIKMYEKKRSASNGIRRS

SEQ ID NO: 11415 - DNA, 1173 bp, Aspergillus nidulans FGSC A4
  CDS (1)..(1173)
atggccaccaagaccttggaagctcgcttcgagcacctttccgttaaggatgattccggaaatgggaataagggcaccagctaccctaagcacaagagctctctgtcaaccgctgtatccctttccggccttggggtagcaggacagctaacaagtggtgccaaccggtcgaatctgcttaagctggccttgcagaataccaatgacaataaggtcaatgccatgaacgcgaacgcttcccagtccccgggcaaaggcactcaaaatccggcatcgctacggaatctagacgagaatggtgaatacgagcaaccggcacctaggaaactacatcttggaatgtttgaaatcggaaagccactgggaaaagggaagtttggcagggtgtacctcgccaaagaacgctcatctgggttcgtatgtgcactcaaagtgttgcacaaatccgaattgcagcagggcggggttcagaagcaggtcagaagggagatcgaaattcaaagcaacctacggcacccgaatgtccttcgactgttcggacacttccaggacagtaagcgaatcttccttattttggaatttgccggtcgaggagagctgtacaagcacctacgcaaagagcaccgattccctgaatggaaggctgcgcattatatcgcgcagatggcatccgcattgaagtacctccacaagaaacatgtcatgcaccgtgacatcaaacccgagaatatcctggtagggattcacggagagatcaagatcagcgactttggctggagcgtccatgccccgaacaaccgtcggcaaacaatgtgcgggacactggattatttgcctcccgagatgctcacttcaaacccccagggcaacttctataatgagaaggtcgacttgtggagtttgggtgttctgacttatgagttcctggtcggagaggcgccattcgaagacactccggttatgacacaaaggaggattcagcgaggagatatgcaagttccttcttttgttagccccgaggctaaggatttaatcaaaaggctgcttgtgcttgatcccgaaaaacgcatttcgcttgatgagatccagaggcatccctggattcttaaacactgcgtcaaagatgatcggaccatcaaacgaggttcggcgcctcacgccgcaaatgaatag

SEQ ID NO: 11416 - protein, 390 aa, Aspergillus nidulans FGSC A4
MATKTLEARFEHLSVKDDSGNGNKGTSYPKHKSSLSTAVSLSGLGVAGQLTSGANRSNLLKLALQNTNDNKVNAMNANASQSPGKGTQNPASLRNLDENGEYEQPAPRKLHLGMFEIGKPLGKGKFGRVYLAKERSSGFVCALKVLHKSELQQGGVQKQVRREIEIQSNLRHPNVLRLFGHFQDSKRIFLILEFAGRGELYKHLRKEHRFPEWKAAHYIAQMASALKYLHKKHVMHRDIKPENILVGIHGEIKISDFGWSVHAPNNRRQTMCGTLDYLPPEMLTSNPQGNFYNEKVDLWSLGVLTYEFLVGEAPFEDTPVMTQRRIQRGDMQVPSFVSPEAKDLIKRLLVLDPEKRISLDEIQRHPWILKHCVKDDRTIKRGSAPHAANE

SEQ ID NO: 11417 - DNA, 1593 bp, Candida albicans SC5314
  CDS (1)..(1593): transl_table=12
atgatgcttccacgtaactcaccacatcgtacagaatcaacattagcgtataacaacaacaacagtaacaacaacaacaacaacaacggtagctcattatttcaaagaaaaccattagcgccaataaatagtgaattcaagatatcaaaaccacaacatataaaacccaatacccattctcatacatttaccacacctacaccgaaaacacgaaacaccgccaccaccaccaccaccaacaacaacaacaggaacaatcatcaatatagaaatcccaatttgaatacttcactcgttttcacaccaacgaaaaactcatcatcatcatcatcatcatcgcattcatcaagtttattatcgtcatcaccatttgttgaagaaccggaaaatcaaccagaatcaaatcatactagagctacatcccattatagaacaacttcaacttctcaatataagtcatcagctaataaggatgcatcgcattcattgatcactagtagtaaaagaaaaacatctaccaaacaaacatcagaatcaacaaaccctaaaagaagaaccacaacaacagctacccaaaatacaaataataacaaaattttaaatccatcattatcgtcatcaactattcgcttttcaactgtttcttcttctacctcttcttccaccacctcatcatcatcatcatcccatacatcacctaaacctcaacaacaacttacattagatgattttgaatttggtaaaattttagggaaaggaaaattaggacgagtttattgtgtcaaacataaacaactgggacttatatttgcattaaaagtgatgtcaaaatcagaaattatgaatcttaaattagaaaaaagtttacgacgagaaattgaaattcaatcaaatttatatcatataaatattactcgattatattcatggtttcatgattctattaatatttatttattattagaatatagtatagaaggtgaattatatactcatttgaaaaaattaaaacgatttgataatataatggcaagtaattatatttttcaaatcactcaagcattgatttttttacatcaacgtggaataattcatcgtgatttaaaaccagaaaatattatgatatctttagataatcaattaaaattaagtgattttggttggtcagtacaaataaatcagaatcagaatcagaatcagattcacaaccaaactcaaactcaaaaaactccccatcagaagaagcaaaaacagaaaagattaactatatgtggtacattagattatttacctccagaaatgattgaaagtaaatctcatgatttttccgttgatatttgggcccttggtatattatgttatgaattacttgtggggaaaccaccatttgaagcaattaatcgaaatataacttatgaaaaaatcgctaaagtagatattaaatatccttctaatctagacgttgatgctattgatttaatatcaaaattggtggttaaagatccaaataaaagattaagtttaaaagaagtattgaatcataattggataattaaaaataaaccaaaatggccaaaaaatatttacaaatga

SEQ ID NO: 11418 - protein, 530 aa, Candida albicans SC5314
MMLPRNSPHRTESTLAYNNNNSNNNNNNNGSSLFQRKPLAPINSEFKISKPQHIKPNTHSHTFTTPTPKTRNTATTTTTNNNNRNNHQYRNPNLNTSLVFTPTKNSSSSSSSSHSSSLLSSSPFVEEPENQPESNHTRATSHYRTTSTSQYKSSANKDASHSLITSSKRKTSTKQTSESTNPKRRTTTTATQNTNNNKILNPSLSSSTIRFSTVSSSTSSSTTSSSSSSHTSPKPQQQLTLDDFEFGKILGKGKLGRVYCVKHKQSGLIFALKVMSKSEIMNLKLEKSLRREIEIQSNLYHINITRLYSWFHDSINIYLLLEYSIEGELYTHLKKLKRFDNIMASNYIFQITQALIFLHQRGIIHRDLKPENIMISLDNQLKLSDFGWSVQINQNQNQNQIHNQTQTQKTPHQKKQKQKRLTICGTLDYLPPEMIESKSHDFSVDIWALGILCYELLVGKPPFEAINRNITYEKIAKVDIKYPSNLDVDAIDLISKLVVKDPNKRLSLKEVLNHNWIIKNKPKWPKNIYK

SEQ ID NO: 11419 - DNA, 1191 bp, Aspergillus fumigatus Af293
  CDS (1)..(1191)
atggctacaaaggcgctcgaggctcgttttgagcatctctctgtcaaagatgatgctgatcatggaaggaatggcagcacatactcaaagcacaagggctctttgtcaacagcggtgtccctctcaggcctcggagccgctgggcaatttaacagtggctcaagtcgatcaaccttgttaaagcttgccttgcaaaacacaaatgagaacaaagtgaatgcgatgcataccggctcatcccctctcaagggagctcagagcacattggcgcatcgtgacacagatgagaatggagaatcgcgacacacgacaccattatacgagcagcccggccccaaaaaattacatctgggaatgtttgagatcggcaagccattgggaaaggggaaatttggtagggtttacctggccaaagagcgatcatccggcttcgtttgtgctcttaaagtcctgcacaaatccgagctgcagcaggggggagtgcagaagcaagttagacgcgagattgagatacagagcaacctacgtcatcccaacgttctcaggctttacggccacttccatgatagcaaacgaattttcttgattttggagttcgccggtcgaggtgagttgtacaagcacctccggaaggagcatcgctttcccgagtggaaggcagctcaatatattgcgcagatggctgccgcattgaagtacttgcataagaagcacgtcatgcatcgcgacatcaagccggagaacatactcgtgggaatccacggggaaatcaagatcagtgactttgggtggagtgtccatgcgcccaataacagaaggcagacgatgtgtggaacactggattatcttcccccagaaatgctcaaacccaacccgcaagacaattactatagcgaaaaggtcgatttatggagcttgggcgtcttaacttatgaattcttggttggggaagcgccctttgaagacactcccgtcatgacacaaagacggattgcgagagcggacatgacggtgccttcatttgtcagccccgaagcaaaagatctcatcaagagattgctcgttctcgacccagacaagcgtatttcccttgatgagatccagcgacatccctggatccttaaacattgcttgaaggatgaccgggtcacgaaacagagttctggttcttcaaaggaagtcaaagcatga

SEQ ID NO: 11420 - protein, 396 aa, Aspergillus fumigatus Af293
MATKALEARFEHLSVKDDADHGRNGSTYSKHKGSLSTAVSLSGLGAAGQFNSGSSRSTLLKLALQNTNENKVNAMHTGSSPLKGAQSTLAHRDTDENGESRHTTPLYEQPGPKKLHLGMFEIGKPLGKGKFGRVYLAKERSSGFVCALKVLHKSELQQGGVQKQVRREIEIQSNLRHPNVLRLYGHFHDSKRIFLILEFAGRGELYKHLRKEHRFPEWKAAQYIAQMAAALKYLHKKHVMHRDIKPENILVGIHGEIKISDFGWSVHAPNNRRQTMCGTLDYLPPEMLKPNPQDNYYSEKVDLWSLGVLTYEFLVGEAPFEDTPVMTQRRIARADMTVPSFVSPEAKDLIKRLLVLDPDKRISLDEIQRHPWILKHCLKDDRVTKQSSGSSKEVKA

SEQ ID NO: 11421 - DNA, 1422 bp, Cryptococcus neoformans var. neoformans B-3501A
  CDS (1)..(1422)
atgtcctcgcagaatgtttctggcctcatggccggtctatctctctatgctccgcagtctcccaaagggtccaaagcacaacaagcgggcaagacgcaggagtcatctcactcttctcagtctcagaataggcttcctccggtgctcaagaaatatatgaatccaggcctcgtccgccctcccaacagtggtcttgccaacaacagtcatccgtcttcctcttactcagatccatcatcacgcggtccgctccttacccttgcgggtgtcaatgtctcatatcccaaatcgggcacagtctctcctatgaacaaatctaagggtgccatcgggcaccattctgctcatgggatccacggaccagcccattcaacctcctcaagagcgatggcgtcttccatcaatcctggcgcttcgaaacatgctgtaacgactagttcttcacatatcactaatttagtttcggagaactgcaagagtctagaattggggcggtatgatggcggcttggaagaagatgaagcaaatcatggggatgccagtgggcctacagccaaaatgcttgagctgtctagtgtcagcgagggtgcaattcccttgtccctaccatcgttcactattggccgcccgttgggtaaaggtaaattcggtcgcgtataccttgctagatctaaggcacctcctcactttattgtcgccctcaaatgtctccataaggcagaaatcattcagggtaaggtagaaagccaggtgcggagagagatagaaattcagcaaaacttgaggcatcctaatattcttcgtctctatggatacttccatgacagcaaacgtatatttttggtcctagaattcgccgcaaagggggaattgtacaaacagctgtctagattaggcaggtttgacgaaaagaagagtagtcgatatatagctcagatggccgatgctttgtcttacttgcacagaaagcatgtcattcaccgagatatcaaacctgaaaatcttctcatcggtttgaatggcgagctcaaaatcggcgactttggctggagtgtgcatgcaccaagtaatcgccgcagcacgctttgtggaactcttgattatcttccccctgagatggtagagggcaaggagcatactgcagctgtcgatctgtgggcattaggtgtgctaacttacgagtttgtcgtcggtggacccccgttcgaggatctctctggaaacgccgctacataccggcgaataaggaatgttgatttacacgttccttcttggatttctcccgaagccactgatctcatcaaaagactccttcggtacaaacctgaggaccgtttacctctgtcccaggtcatgattcacccgtggatcaagatgtatgagaagaaaagatcggcaagtaacgggatcaggaggtcataa

SEQ ID NO: 11422 - protein, 473 aa, Cryptococcus neoformans var. neoformans B-3501A
MSSQNVSGLMAGLSLYAPQSPKGSKAQQAGKTQESSHSSQSQNRLPPVLKKYMNPGLVRPPNSGLANNSHPSSSYSDPSSRGPLLTLAGVNVSYPKSGTVSPMNKSKGAIGHHSAHGIHGPAHSTSSRAMASSINPGASKHAVTTSSSHITNLVSENCKSLELGRYDGGLEEDEANHGDASGPTAKMLELSSVSEGAIPLSLPSFTIGRPLGKGKFGRVYLARSKAPPHFIVALKCLHKAEIIQGKVESQVRREIEIQQNLRHPNILRLYGYFHDSKRIFLVLEFAAKGELYKQLSRLGRFDEKKSSRYIAQMADALSYLHRKHVIHRDIKPENLLIGLNGELKIGDFGWSVHAPSNRRSTLCGTLDYLPPEMVEGKEHTAAVDLWALGVLTYEFVVGGPPFEDLSGNAATYRRIRNVDLHVPSWISPEATDLIKRLLRYKPEDRLPLSQVMIHPWIKMYEKKRSASNGIRRS

SEQ ID NO: 11423 - DNA, 1236 bp, Neurospora crassa OR74A
  CDS (1)..(1236)
atggcgggccaaccaatggagtcacgcttcgggcgcatgtcgatacatgacgaaaacaacgatccaagcgatggcgctcgacttcagcaaaaggcgagagagctcaagtcaaagatcgcgcaaaggaagaatccgcccatcatctctagcgaacctccctcaccacgaaaaccacagagaaccgttcccgttgccacgaaatcttcgaccattgtttcatccgccgctcacaagtccacaacatacgccggcattcgtagagtcgacgacgatgatcacgacgaactctcgcagccaatggcctccgctagcgtgtcttcgacaggtacatctacatccgagtcatcctctagcgccggctacgaacagtcgatatcccctaaacaattccaccttggcatgtttgaaatcggtcggccgcttggcaaaggcaaattcggccgcgtatacctcgcgcgggagcgcagctctggtttcatctgtgccctcaaggtgctctacaagtcggaattgcaacacggcactggagtcgagaagcaagtgcgtcgcgagatcgaaattcaatccaacctacgacaccccaatatcttgaagttgtacggacacttccatgacagcaagcgcatctttttgattctcgagtacgccggcaagggcgagctgtacaagcacctgcgcaaggaaaaccgtttccccgaatggaaagcagcgcagtatgttgcgcaaatggcatccgccctcaaatacttgcaccgcaagcacgtcatccaccgcgacatcaaaccggagaacattctagtgggcattcacggggaaatcaagatatcggatttcggctggagcgtgcacgcgcccaacaaccggaggcagacgctctgcggaaccctggattacctgccgccagagatgatccggagcggatccaaggataactggtacaatgagaaagtggacttgtggagcttgggcgtgttgacgtatgagtttttggtcggcgaggcgccgtttgaggatacgccgatcatgacacagaagaggattgcgagggcggatatgaccattcccgagtgggtcagcaaggaggcaaaggatctgatcaagaagttgctggtactcgaccctgagaagcgtcttcctttggaggaggtggagaaccacccttggatcttgaagcactgcgtcaagggagaaagagctgcgaaccgggagaaaatggcaagtaagatgggcaactga

SEQ ID NO: 11424 - protein, 411 aa, Neurospora crassa OR74A
MAGQPMESRFGRMSIHDENNDPSDGARLQQKARELKSKIAQRKNPPIISSEPPSPRKPQRTVPVATKSSTIVSSAAHKSTTYAGIRRVDDDDHDELSQPMASASVSSTGTSTSESSSSAGYEQSISPKQFHLGMFEIGRPLGKGKFGRVYLARERSSGFICALKVLYKSELQHGTGVEKQVRREIEIQSNLRHPNILKLYGHFHDSKRIFLILEYAGKGELYKHLRKENRFPEWKAAQYVAQMASALKYLHRKHVIHRDIKPENILVGIHGEIKISDFGWSVHAPNNRRQTLCGTLDYLPPEMIRSGSKDNWYNEKVDLWSLGVLTYEFLVGEAPFEDTPIMTQKRIARADMTIPEWVSKEAKDLIKKLLVLDPEKRLPLEEVENHPWILKHCVKGERAANREKMASKMGN

SEQ ID NO: 11425 - DNA, 969 bp, Tribolium castaneum
  CDS (1)..(969)
atgtcccaaaggaaggcccccgtgtgccaaaacaaggagaacaacgttccgcgcgccgcggcgaaaaagggccccccggcgcaaaagggggctctctccgagaacaaggcccagaagggggctgcaagtgacacggctcaggagagttcgaaggggcggcgttggaccttggcggacttcgatatcgggaagcccctcgggcgtggtaaattcggaaacgtgtacttagctcgcgaaaaacagtcgaaatttgtcgttgcgcttaaagtgctgttcaaaagtgcgatcaaagacttcaataacgagcaccaagtgcggagggaaatcgagattcagtcgcacttgagacacaacaatattctgcgaatgtatggctattttcacgacgagtcgagggtctacataatactggaatacgcccccaatggcacatgctacaaggcgctgcaagcagcccccaacaggcgcttcccggaggagacatgcgcccgctacatccgccaaattgcggacgctctcagttactgccacacgaagaaagtcattcacagagacataaaaccggagaacttgctactttgtgcccaaggccaaatcaaaatcgctgattttgggtggtctgtacacgccccctcctcccgtaggactactctctgtggcacccttgattacctcccgcctgaaatggtcgtggggcaaacacacaacgaaaaagtggatttgtggagtttgggcgttttgtgttttgaatttctgacagggaagcccccatttgaagcgcccacgttcgaggagacgtaccggaatatcagcaaggcctactacaagtttccgccgtatgtctccgagggggcgcaagatttgattaggaaattgcttgtagttaatccaaatgaaaggcttgagctgagtcaagtgatgaaacatccgtggattgtctcgcacacagaggagaagagtagtcaataa

SEQ ID NO: 11426 - protein, 322 aa, Tribolium castaneum
MSQRKAPVCQNKENNVPRAAAKKGPPAQKGALSENKAQKGAASDTAQESSKGRRWTLADFDIGKPLGRGKFGNVYLAREKQSKFVVALKVLFKSAIKDFNNEHQVRREIEIQSHLRHNNILRMYGYFHDESRVYIILEYAPNGTCYKALQAAPNRRFPEETCARYIRQIADALSYCHTKKVIHRDIKPENLLLCAQGQIKIADFGWSVHAPSSRRTTLCGTLDYLPPEMVVGQTHNEKVDLWSLGVLCFEFLTGKPPFEAPTFEETYRNISKAYYKFPPYVSEGAQDLIRKLLVVNPNERLELSQVMKHPWIVSHTEEKSSQ

SEQ ID NO: 11427 - DNA, 753 bp, Arabidopsis thaliana
  CDS (1)..(753)
atgttgtatcaggcggcttcagaggctgcacaaaagagatggactacaagcgatttcgatatcggaaagccacttggtagaggaaagtttggccatgtttatctagcaagagagaaacggagcgatcacattgtggctttaaaggttctttttaaggctcagcttcaacaatctcaagttgaacaccagttacgaagggaagtagagattcaatctcatcttcggcatcccaatattctgcggctctacggttacttctatgatcagaaaagagtttatttgattttggagtatgctgtaaggggtgagctttataaagagcttcagaagtgcaagtacttcagcgaacgtcgagcagcaactggtgagctcaagattgcagattttggatggtcagtacacacattcaaccgtagaaggactatgtgtggcactttggattaccttccacctgagatggtggaaagcgttgaacatgatgcgagtgtcgatatatggagtctaggaattctctgctacgaatttctttatggtgttcctccttttgaggccagggagcattcagagacatacaaaaggattgttcaagtggatctcaagttccctcccaaacccattgtgtcatcatctgcaaaggacctgattagccagatgttggttaaggagtctacgcaacgtttggccttgcacaagcttcttgaacacccgtggattgtgcaaaacgcagacccatcaggcctttacagaggatga

SEQ ID NO: 11428 - protein, 250 aa, Arabidopsis thaliana
MLYQAASEAAQKRWTTSDFDIGKPLGRGKFGHVYLAREKRSDHIVALKVLFKAQLQQSQVEHQLRREVEIQSHLRHPNILRLYGYFYDQKRVYLILEYAVRGELYKELQKCKYFSERRAATGELKIADFGWSVHTFNRRRTMCGTLDYLPPEMVESVEHDASVDIWSLGILCYEFLYGVPPFEAREHSETYKRIVQVDLKFPPKPIVSSSAKDLISQMLVKESTQRLALHKLLEHPWIVQNADPSGLYRG

SEQ ID NO: 11429 - DNA, 879 bp, Oryza sativa subsp. indica
  CDS (1)..(879)
atggcgatcgccaccgagtcgcgctgcgaggaggagaaggcttcgccgcattcgcaggaggtgaagcggtgggtgttgtctgattttgacatcgggaagcccctcgggaggggcaagttcggccatgtttacttagcaagagaaaagagaagtaaccatattgtggctttgaaagtacttttcaagagccaactaaagcagtcccaggtggagcatcagctacgtcgggaagttgagattcagagtcatcttcgtcatcccaacattctacggctgtatgggtatttctatgatcagacccgtgtgtacttgatcttggagtatgccttaaaaggtgaactttataaggagttgcagaggtgcaagcatttctctgaaagacgttcagcgacttacattgcatcactggcgcgtgcgctcatctaccttcacggaaagcatgtgatccatagagacattaaacctgaaaatcttttaattgggtcccagggcgaactgaaaattgcagactttggttggtctgtgcacaccttcaacagaagaaggacaatgtgtggaacattagattacctgccccctgaaatggtggagaagactgaacatgactaccatgttgacatttggagcttggggatcctgtgctatgagttcctttatggagtcccacctttcgaagcaaaagaacactccgaaacatatcgcaggattgtgaaagttgacttgaagttcccactgaaaccattcgtgtccccggctgcgaaagacctaatttcacagatgctcgtgaagaattcggcgcatcgtctgcccctccacaagctcctcgagcacccttggatagttcaaaacgctgatccctccggcgtgtacagaggctag

SEQ ID NO: 11430 - protein, 292 aa, Oryza sativa subsp. indica
MAIATESRCEEEKASPHSQEVKRWVLSDFDIGKPLGRGKFGHVYLAREKRSNHIVALKVLFKSQLKQSQVEHQLRREVEIQSHLRHPNILRLYGYFYDQTRVYLILEYALKGELYKELQRCKHFSERRSATYIASLARALIYLHGKHVIHRDIKPENLLIGSQGELKIADFGWSVHTFNRRRTMCGTLDYLPPEMVEKTEHDYHVDIWSLGILCYEFLYGVPPFEAKEHSETYRRIVKVDLKFPLKPFVSPAAKDLISQMLVKNSAHRLPLHKLLEHPWIVQNADPSGVYRG

SEQ ID NO: 11431 - DNA, 882 bp, Vitis vinifera
  CDS (1)..(882)
atggcgatccccgcagagactcaacctcaggagaaggcttcttcagatgttccagcagtggagaaaaaaaggtggaccctaaatgactttgacattggaaagcccctggggcgaggaaagttcggtcatgtctatttggcgagggaaaagagaagcaatcatattgtggccctaaaagtgctcttcaagagccaactgcaacagtctcaggttgagcatcagcttcgccgggaagttgaaatacaaagtcatcttcgacaccccaatatcttgcgcctttatgggtacttttatgatcagaaacgagtgtatttgatattagaatatgcggccaaaggtgaactctacaaggaactacagaagtgtaaatacttcagtgaaaggcgtgctgctacttacgttgcttcattagctcgggctctcatatattgccatgggaagcatgtaatacacagagacatcaaacctgagaacctgttagttggggcacagggtgaacttaagattgcagattttggatggtcagtgcatacatttaaccgcagaaggaccatgtgtggcacactggactaccttccacctgagatggtggagagtgtggagcatgatgctagtgtggacatatggagccttggtgtactttgctatgagtttctttatggggttcctccttttgaggctaaggaacactcagacacctacagaaggattgtgcaagttgatttaaagttccccccaaaaccaatagtctcttctacagcgaaggacctcatcagtcagatgctggtgaaggattcttcgcagcggctcccactacacaagctccttgagcatccctggatcgttcagaatgcagatccctctggtgtctatagggcttga

SEQ ID NO: 11432 - protein, 293 aa, Vitis vinifera
MAIPAETQPQEKASSDVPAVEKKRWTLNDFDIGKPLGRGKFGHVYLAREKRSNHIVALKVLFKSQLQQSQVEHQLRREVEIQSHLRHPNILRLYGYFYDQKRVYLILEYAAKGELYKELQKCKYFSERRAATYVASLARALIYCHGKHVIHRDIKPENLLVGAQGELKIADFGWSVHTFNRRRTMCGTLDYLPPEMVESVEHDASVDIWSLGVLCYEFLYGVPPFEAKEHSDTYRRIVQVDLKFPPKPIVSSTAKDLISQMLVKDSSQRLPLHKLLEHPWIVQNADPSGVYRA

SEQ ID NO: 11433 - DNA, 903 bp, Picea sitchensis
  CDS (1)..(903)
atggcgatgatgtccattccagagagcagtgtacatccagaaaataatgatcaggtggaaggggatgacaagaaggctgggaaacgttggacccttgaagattttgacattgggaagcccttaggaagagggaaatttggcaatgtgtatcttgccagagagaagaggagcaagtatgtggttgcattaaaagtattattcaagaatcagctccaacaatcccaggtagaacaccagttgaggagggagatcgaaatacagagtcacctgcgacatcccaatatacttcgcttgtatggatacttttatgatcagaaccgtgtgtatcttattctggaatatgctccaagaggtgagctgtataaagagctacaacgctgtaagtgctttaatgaaaaacgtgcagctacttacattgcatcactggcacgggctctactttactgccatgaaaagcatgtgatacaccgggacatcaagccagagaatttgctgattggttttaagggtgaactgaaaattgcagattttggatggtctgtgcatacctttagtagaaggcgtaccatgtgtggaaccttggattatttacccccagaaatggttgaaaacaaggaacatgatactgcagttgacatttggagcttgggagtactctgttatgagtttctctatggcattccaccatttgaagcaaagaagcactctgatacttacagaaggattatcaaaattgatttgaagtttcctcctaccccagtagtttctgatgcagcaaaggacctcattcgtcaaatattagtgaaagattctactcagcgcctccctttacagaaaattctcgaacacccatggattgttcaaaatgatgatcctactggtgtttatggacagaatcattaa

SEQ ID NO: 11434 - protein, 300 aa, Picea sitchensis
MAMMSIPESSVHPENNDQVEGDDKKAGKRWTLEDFDIGKPLGRGKFGNVYLAREKRSKYVVALKVLFKNQLQQSQVEHQLRREIEIQSHLRHPNILRLYGYFYDQNRVYLILEYAPRGELYKELQRCKCFNEKRAATYIASLARALLYCHEKHVIHRDIKPENLLIGFKGELKIADFGWSVHTFSRRRTMCGTLDYLPPEMVENKEHDTAVDIWSLGVLCYEFLYGIPPFEAKKHSDTYRRIIKIDLKFPPTPVVSDAAKDLIRQILVKDSTQRLPLQKILEHPWIVQNDDPTGVYGQNH

SEQ ID NO: 11435 - DNA, 909 bp, Picea sitchensis
  CDS (1)..(909)
atggctccggaggtcaatgccaatcctgatgaaacaacggcgcagattcctcagaagaacgaaaaggaggatgctaagaaggatgaaaggcgctggactcttaatgatttcgacattggaaaacctctcggccggggcaaatttggcaacgtttatcttgccagagagaagaagagcaagtatgttgttgcgttgaaagttctattcaagaatcagctccagcaatctcaggtagagcaccagctgcgaagagaaattgaaatccagagtcatcttcggcatcccaatatacttcgattgtttggttatttttatgatcagagtcgtgtctatctgattctcgaatacgctgcaaaaggtgagctctacaaagagcttcaacgctgtaaatgcttcaacgaaaagcgggcagccacttacattgcatcattggcacgagccttgatctattgtcatgaaaagcatgtaatacaccgggatatcaagccagagaacttattagttggcatacagggtgaactcaaaattgcagattttggatggtctgtgcacacttttgatagaaggcgaaccatgtgtggaaccttggattacttacctcctgaaatggtggagaacaaggagcatgatgccggggtagacatttggagcttgggagttttgtgctatgagtttctttatgggtttcctccctttgaagctaaggagcattcagacacttacaaaaggattgtcaaagtcgatttgaaatttcctcccaggccttttgtctctgatgcagctaaagaccttattcgtcaacttttggtgaaagactcttcacaaagactgcccctacacaaagttctccaacatccctggatttttcaaaacgctgatcctgatggcgtttacaaggcactgcattga

SEQ ID NO: 11436 - protein, 302 aa, Picea sitchensis
MAPEVNANPDETTAQIPQKNEKEDAKKDERRWTLNDFDIGKPLGRGKFGNVYLAREKKSKYVVALKVLFKNQLQQSQVEHQLRREIEIQSHLRHPNILRLFGYFYDQSRVYLILEYAAKGELYKELQRCKCFNEKRAATYIASLARALIYCHEKHVIHRDIKPENLLVGIQGELKIADFGWSVHTFDRRRTMCGTLDYLPPEMVENKEHDAGVDIWSLGVLCYEFLYGFPPFEAKEHSDTYKRIVKVDLKFPPRPFVSDAAKDLIRQLLVKDSSQRLPLHKVLQHPWIFQNADPDGVYKALH

SEQ ID NO: 11437 - DNA, 858 bp, Zea mays
  CDS (1)..(858)
atgtcgacgagtgaggtgtggagcttgtccgatttcgaaatcagcaagtacatcggtgagggcaggttcggcaaggtctacctcgcccgcgagaagcagagcgggtacgtggtggcgctcaaggtgatatttaaggcgaaactgcagaagtaccacttccacgcgcacctgcggcgggagatcgagatccagcagagtctcgaccaccctaacgtgctccgcctcttcacctggttccacgacgaagagcgagtcgtcctcgtcctcgagtacgcggcccgtggcgagctctacaaggtccttcgcgctgctggccgcttcaccgagcgcacgtccgccacatatgtagcgagtcttgctggtgcactggcatactgtcacaaaaagcaagtcattcatagggacatcaagcctgagaatttgctaatcgacatcgagggccggcttaaaattgcagattttggatgggcggctcgttcaaatgctaaacgccacacactctgtggcacaatcgattatctggcaccagagatggtagagaaaaaagctcatgaccatgctgtggacaactggacattaggaatcctgtgctatgagttcttatatggttcacctccttttgaagctgatgaacaggatgataccttgagaaggatagttagggtggatttggcattcccttcatctccttgtgtatcttcagaggctaaggatctcatttccaagcttctagttaaggattcaagcaagaggctttgccttgaagacatcatgaagcatccatggataaagaagaatgcagacccttcaggcagttgcattaagcaaaaagatgtcacaagatcaaagcttctgtaa

SEQ ID NO: 11438 - protein, 285 aa, Zea mays
MSTSEVWSLSDFEISKYIGEGRFGKVYLAREKQSGYVVALKVIFKAKLQKYHFHAHLRREIEIQQSLDHPNVLRLFTWFHDEERVVLVLEYAARGELYKVLRAAGRFTERTSATYVASLAGALAYCHKKQVIHRDIKPENLLIDIEGRLKIADFGWAARSNAKRHTLCGTIDYLAPEMVEKKAHDHAVDNWTLGILCYEFLYGSPPFEADEQDDTLRRIVRVDLAFPSSPCVSSEAKDLISKLLVKDSSKRLCLEDIMKHPWIKKNADPSGSCIKQKDVTRSKLL

SEQ ID NO: 11439 - DNA, 858 bp, Zea mays
  CDS (1)..(858)
atgccgacgagtgaggtgtggagcttgtccgattttgaaatcagcaagtacatcgctgagggcaggttcggcaaggtctacctcgcccgcgagaagcagagcgggtacgtggtggcgctcaaggtgatatttaaggcgaaactgaagaagcaccgcttccacgcgcacctgcggcgggagatcgagatccagcagagtctcgatcaccctaacgtgctccgcctcttcacctggttccacgacgaagagcgagtcgtcctcgtcctcgagtacgcggcccgtggcgagctctacaaggtccttcgcgctgctggccgcttcaccgagcgcacgtccgccacgtatgtagcgagtcttgctggtgcactggcatactgtcacaaaaagcaagtcattcatagggacatcaagcctgagaatttgctaatcgacatcgagggccggcttaaaattgcagattttggatgggcggctcgttcaaatgctaaacgccacacactctgtggcacaatcgattatctggcaccagagatggtagagaaaagagctcatgaccatgctgtggacaactggacattaggaatcctgtgctatgagttcttatatggttcacctccttttgaagctgatgaacaggatgataccttgagaaggatagttagggtggatttggcattcccttcatctccttgtgtatcttcagaggctaaggatctcatttccaagcttctagttaaggattcaagcaagaggctttgccttgaagacatcatgaagcatccatggataaagaagaatgcagacccttcaggcagttgcattaagcaaaaagatgtcacaagatcaaagcttctgtaa

SEQ ID NO: 11440 - protein, 285 aa, Zea mays
MPTSEVWSLSDFEISKYIAEGRFGKVYLAREKQSGYVVALKVIFKAKLKKHRFHAHLRREIEIQQSLDHPNVLRLFTWFHDEERVVLVLEYAARGELYKVLRAAGRFTERTSATYVASLAGALAYCHKKQVIHRDIKPENLLIDIEGRLKIADFGWAARSNAKRHTLCGTIDYLAPEMVEKRAHDHAVDNWTLGILCYEFLYGSPPFEADEQDDTLRRIVRVDLAFPSSPCVSSEAKDLISKLLVKDSSKRLCLEDIMKHPWIKKNADPSGSCIKQKDVTRSKLL

SEQ ID NO: 11441 - DNA, 1002 bp, Saccoglossus kowalevskii
  CDS (1)..(1002)
atgtcatcaaaaaagattggatcagtggaaagtggtgccatggcaagcaaaacagattatggtcctaaaagagttttaaaagagactaatcagcaaacatcgtcaaaacctgaagctaaatttgcaaaaccactaccacagaatgagccagctcaaggtcctggtaaccatacaaggaaaaagtggactttaagtgactttgatattggtcgaccacttggcaaaggaaaattcggaaatgttttattggctcgcgagaagaaaagtaaattcatcctagcgttgaaagttctcttcaagtcccagttacaaaaggctggagtagaacatcagcttagaagagaaattgaaatacagtctcaccttaggcatccaaatattttgagaatgtatggatatttctacgatgacattagagtgtaccttattctagagtttgcacctcagggagaactatacaaagaattgcagaaacgtggaaggtttgatgaaaaaagatctgctacatatgtaggtcagttggcagatgctttaaaatattgtcatgcaaaaaaagttatccacagagatataaaacctgagaatttactattaggcctgagaggtgatttgaaaattgctgactttggttggtctgtgcatgcaccatcatcaagacgtgcaacattatgcggtacattagactacttgccacctgagatgatagagggtagaatgcatgatgagaaggtggacttgtggagtttaggtgtactatgttatgaatttctagttggtaaaccaccatttgaagcagaaggacatagtgaaacctacaggaaaatctcaaaagtagattttagatatccatcctttgttacagatggtgctagggatcttgtgtccaagttgttaagacataatccagctatgcgactgtctttggatggagtgcttaatcatccttggatcaaagaacatggtgttttgtcagaaccaacatcgtcgtcatcttcatcatga

SEQ ID NO: 11442 - protein, 333 aa, Saccoglossus kowalevskii
MSSKKIGSVESGAMASKTDYGPKRVLKETNQQTSSKPEAKFAKPLPQNEPAQGPGNHTRKKWTLSDFDIGRPLGKGKFGNVLLAREKKSKFILALKVLFKSQLQKAGVEHQLRREIEIQSHLRHPNILRMYGYFYDDIRVYLILEFAPQGELYKELQKRGRFDEKRSATYVGQLADALKYCHAKKVIHRDIKPENLLLGLRGDLKIADFGWSVHAPSSRRATLCGTLDYLPPEMIEGRMHDEKVDLWSLGVLCYEFLVGKPPFEAEGHSETYRKISKVDFRYPSFVTDGARDLVSKLLRHNPAMRLSLDGVLNHPWIKEHGVLSEPTSSSSSS

SEQ ID NO: 11443 - DNA, 861 bp, Zea mays
  CDS (1)..(861)
atgtcgacgagtgaggtgtggagcttgtccgatttcgaaatcagcaagtacatcggtgagggcaggttcggcaaggtctacctcgcccgcgagaagcagagcgggtacgtggtggcgctcaaggtgatatttaaggcgaaactgcagaagtaccacttccacgcgcacctgcggcgggagatcgagatccagcagagtctcgaccaccctaacgtgctccgcctcttcacctggttccacgacgaagagcgagtcgtcctcgtcctcgagtacgcggcccgtggcgagctctacaaggtccttcgcgctgctggccgcttcaccgagcgcacgtccgccacatatgtagcgagtcttgctggtgcactggcatactgtcacaaaaagcaagtcattcatagggacatcaagcctgagaatttgctaatcgacatcgagggccggcttaaaattgcagattttggatgggcggctcgttcaaatgctaaacgccacacactctgtggcacaatcgattatctggcaccagagatggtagagaaaaaagctcatgaccatgctgtggacaactggacattaggaatcctgtgctatgagttcttatatggttcacctccttttgaagctgatgaacaggatgataccttgagaaggatagttagggtggatttggcattcccttcatctccttgtgtatcttcagaggctaaggatctcatttccaagcttctagttaaggattcaagcaagaggctttgccttgaagacatcatgaagcatccatggataaagaagaatgcagacccttcaggcagttgcattaagcaaaaagatgtcacaagatcaaaggtaaaacgataa

SEQ ID NO: 11444 - protein, 286 aa, Zea mays
MSTSEVWSLSDFEISKYIGEGRFGKVYLAREKQSGYVVALKVIFKAKLQKYHFHAHLRREIEIQQSLDHPNVLRLFTWFHDEERVVLVLEYAARGELYKVLRAAGRFTERTSATYVASLAGALAYCHKKQVIHRDIKPENLLIDIEGRLKIADFGWAARSNAKRHTLCGTIDYLAPEMVEKKAHDHAVDNWTLGILCYEFLYGSPPFEADEQDDTLRRIVRVDLAFPSSPCVSSEAKDLISKLLVKDSSKRLCLEDIMKHPWIKKNADPSGSCIKQKDVTRSKVKR

SEQ ID NO: 11445 - DNA, 837 bp, Ixodes scapularis
  CDS (1)..(837)
atgtctgcttgcaggttcacaacggaatggacactgcaggattttgaagtaggcaagccactgggcaaggggaagttcggaaatgtttacctggcacgcgagaaaaacaccaagttcatcatcgccctcaaggtgatgtttaaatctcagcttcaaaaaaataatgttgagcatcagcttcgccgggaaattgaaatccagtcgcatctcagccaccctcacgtcctgaaactgtacgggtggttccacgacgccacccggatctacctgatcctggagtatgcacccaacggcgagctctacaagcagctcacaaaggccaagaggttcgacgacaagagggccgccacctacatctaccagatgtgtgtggccctcaagtattgtcacgccaacaaggtgatccaccgggacatcaagcccgagaacctgcttctcggctacaacggggagctcaagattgcggacttcggctggtccgtgcacgcgccctcatccaggcgggtgaccatgtgcggcaccctggactacctgccgcccgagatggtggagaacagcgtgtacgacgagcgggtggacctgtgggccctgggcgtgctcacctacgagttcctggtgggcaacccgcccttcgagtccaagtctacccaggccacctacggtcgcatccgtgccgtggatcttcacttcccggatcacgtctgcccgccggctagggacctcatcggcaagctcctgaagaaagtcccgaaggaacgagcatcgttggacgaagtgctggcacacccgtgggtcgtggacaacgccgacacgacggtcgaagcgtcaactctttga

SEQ ID NO: 11446 - protein, 278 aa, Ixodes scapularis
MSACRFTTEWTLQDFEVGKPLGKGKFGNVYLAREKNTKFIIALKVMFKSQLQKNNVEHQLRREIEIQSHLSHPHVLKLYGWFHDATRIYLILEYAPNGELYKQLTKAKRFDDKRAATYIYQMCVALKYCHANKVIHRDIKPENLLLGYNGELKIADFGWSVHAPSSRRVTMCGTLDYLPPEMVENSVYDERVDLWALGVLTYEFLVGNPPFESKSTQATYGRIRAVDLHFPDHVCPPARDLIGKLLKKVPKERASLDEVLAHPWVVDNADTTVEASTL

SEQ ID NO: 11447 - DNA, 882 bp, Ricinus communis
  CDS (1)..(882)
atggcgattgctgcagagacccaacctcaagacaaggcaagtacagaggtggcggcgacggagaaaaggagatggacacttaatgatttcgatatagggaagccacttgggcgaggaaagtttggacatgtctatttagcaagagagaaaaggagcaatcatattgtggctcttaaggtgctctttaagagccagttgcaacagtcgcaagttgaacatcagctccgacgcgaagttgaaattcaaagtcatcttcgacatcccaacattttgcgcctttatggttacttttatgatcaaaagcgggtttatctgatactggagtatgcagcgaagggggaactctacaaagaactgcagaagtgtaaatactttagtgaaagacgtgctgctacgtatgtggcatcattggctcgggccctcatttattgccatggcaagcatgtaatacacagagacatcaaaccagagaaccttttggttggtgcacagggagagctcaagattgcagattttggttggtcagtgcacacatttaaccgaagacggacaatgtgtggtacattggattacctgccccctgagatggtggaaagtgtagagcatgatgctagtgttgatatctggagtcttggggttttgtgttatgagtttttatatggttctcctccttttgaggccaaagaacactcagacacttacagaaggattgtgcaagtagatcttaagttccctccaaaacccattgtttcttcttctgccaaggaccttattagccagatgcttgtcaaggattcttcacagcgcctgccactacacaagctacttgagcacccctggattgttcagaatgcggatccttctggtctctataggggttaa

SEQ ID NO: 11448 - protein, 293 aa, Ricinus communis
MAIAAETQPQDKASTEVAATEKRRWTLNDFDIGKPLGRGKFGHVYLAREKRSNHIVALKVLFKSQLQQSQVEHQLRREVEIQSHLRHPNILRLYGYFYDQKRVYLILEYAAKGELYKELQKCKYFSERRAATYVASLARALIYCHGKHVIHRDIKPENLLVGAQGELKIADFGWSVHTFNRRRTMCGTLDYLPPEMVESVEHDASVDIWSLGVLCYEFLYGSPPFEAKEHSDTYRRIVQVDLKFPPKPIVSSSAKDLISQMLVKDSSQRLPLHKLLEHPWIVQNADPSGLYRG

SEQ ID NO: 11449 - DNA, 828 bp, Zea mays
  CDS (1)..(828)
atgacaacgctggaaatatctgttttttcaatttgtgctttagttaatcatcctagtgagctgctatgtcttacagtgctattttttgtgtggaaacagagcaatcaaattgtggctttgaaagttcttttcaagagccagcttaagcaatcacaggtcgagcatcagctgcgacgcgaagtggagattcagagtcatcttcgtcatcctaatattcttcgcctgtatgggtacttctatgatcagacccgggtttacctaatcctggaatatgctgccaagggtgagctgtataaggaactgacaaggtgtaaacatttttctgagagacgttcagcaacttatattgcatcattggctagagctctgatctacctgcatgggaagcatgttatccatcgggacattaaaccagaaaatcttttggttggagcccagggcgagatcaaaatcgccgactttggctggtctgtgcataccttcaacagaagaaggactatgtgcggaactctggattacctgccgcctgaaatggtggagaagacagaacatgattaccatgttgacatatggagcctgggtattctgtgttatgagttcctttatggggtcccaccttttgaagctaaggagcactcagaaacatacagaaggatagtaaaagtcgacttgaagttcccactgaaaccattcgtttcgcccgccgcaaaggatttgatttcccagatgctggtcaagaactcggcccagcggctgcctctccacaaggttcttgagcacccatggatcgtccagaacgccgacccttccggtgtgtgcagaggatag

SEQ ID NO: 11450 - protein, 275 aa, Zea mays
MTTLEISVFSICALVNHPSELLCLTVLFFVWKQSNQIVALKVLFKSQLKQSQVEHQLRREVEIQSHLRHPNILRLYGYFYDQTRVYLILEYAAKGELYKELTRCKHFSERRSATYIASLARALIYLHGKHVIHRDIKPENLLVGAQGEIKIADFGWSVHTFNRRRTMCGTLDYLPPEMVEKTEHDYHVDIWSLGILCYEFLYGVPPFEAKEHSETYRRIVKVDLKFPLKPFVSPAAKDLISQMLVKNSAQRLPLHKVLEHPWIVQNADPSGVCRG

SEQ ID NO: 11451 - DNA, 1002 bp, Ostreococcus tauri
  CDS (1)..(1002)
atgcacgcgcgcggaacgccttcgagtcagaggaacgacggattggaaaaagagaacgcgcaggcgtcgtcgcgagggatgaagagtgcgacgccaccgagcgggaagacaccgggacgaagtggtctgcagtcgagaacggagaatgcgagcgagagcggacgaggcgacgagcgagaggcgacgaaggagtggactcttgacgacttcgacatcgggaagccgctgggtaagggcaagttcgggtcggtgtacttggcgagagaaaagagaagtaagtacatcgtcgcactcaaggtgttgcacaagtcgcagctgtgcgcgtcgcacgtggagcatcagttgaggagagagattgagatacagtcgcacctgagacatccaaacatcttgcgactgtacggatacttctacgacaacacgcgagtattcttgatcttggaatacgccgcattgggagaattgtacaaggagctgcagcgtgcgaaacggttcagtgaacggaagagcgcgacgtacattgcgtctctcgcgcgcgcgctcatttattgccacaagaagcatgtcattcatcgggacatcaagcccgaaaacttgctcgtgggcatcaagggcgagctcaagattgctgatttcggttggtccgtgcatgcgccaaatagccgtcgtcagacgctgtgcgggacgcttgactacttgccgcctgagatggtggagggtcgtgaccacgactacgccgtcgacgtgtggtcactcggcgtgctggcgtatgagttcttagtcggcacgcccccattcgaggcggaagggcacagcgagacgtacaagcgtatccttcgcgttgatttgcagttcccgtcgtacgtgagcgaaaacgccaaagacttgatccgaagtttgctcgtcaaggaaccggcgcagcgtctgccgctcagtcgacttttggaccacccgtggatcaaggaaaacgcgtcgcccaacggtattccgctgcccgagtga

SEQ ID NO: 11452 - protein, 333 aa, Ostreococcus tauri
MHARGTPSSQRNDGLEKENAQASSRGMKSATPPSGKTPGRSGLQSRTENASESGRGDEREATKEWTLDDFDIGKPLGKGKFGSVYLAREKRSKYIVALKVLHKSQLCASHVEHQLRREIEIQSHLRHPNILRLYGYFYDNTRVFLILEYAALGELYKELQRAKRFSERKSATYIASLARALIYCHKKHVIHRDIKPENLLVGIKGELKIADFGWSVHAPNSRRQTLCGTLDYLPPEMVEGRDHDYAVDVWSLGVLAYEFLVGTPPFEAEGHSETYKRILRVDLQFPSYVSENAKDLIRSLLVKEPAQRLPLSRLLDHPWIKENASPNGIPLPE

SEQ ID NO: 11453 - DNA, 849 bp, Arabidopsis thaliana
  CDS (1)..(849)
atgttgtatcaggcggcttcagaggctgcacaaaagagatggactacaagcgatttcgatatcggaaagccacttggtagaggaaagtttggccatgtttatctagcaagagagaaacggagcgatcacattgtggctttaaaggttctttttaaggctcagcttcaacaatctcaagttgaacaccagttacgaagggaagtagagattcaatctcatcttcggcatcccaatattctgcggctctacggttacttctatgatcagaaaagagtttatttgattttggagtatgctgtaaggggtgagctttataaagagcttcagaagtgcaagtacttcagcgaacgtcgagcagcaacttatgttgcgtcattggctagagccctcatctattgccatggaaagcatgtaattcacagagatataaaacctgaaaatctgttgattggtgctcagggtgagctcaagattgcagattttggatggtcagtacacacattcaaccgtagaaggactatgtgtggcactttggattaccttccacctgagatggtggaaagcgttgaacatgatgcgagtgtcgatatatggagtctaggaattctctgctacgaatttctttatggtgttcctccttttgaggccagggagcattcagagacatacaaaaggattgttcaagtggatctcaagttccctcccaaacccattgtgtcatcatctgcaaaggacctgattagccagatgttggttaaggagtctacgcaacgtttggccttgcacaagcttcttgaacacccgtggattgtgcaaaacgcagacccatcaggcctttacagaggatga

SEQ ID NO: 11454 - protein, 282 aa, Arabidopsis thaliana
MLYQAASEAAQKRWTTSDFDIGKPLGRGKFGHVYLAREKRSDHIVALKVLFKAQLQQSQVEHQLRREVEIQSHLRHPNILRLYGYFYDQKRVYLILEYAVRGELYKELQKCKYFSERRAATYVASLARALIYCHGKHVIHRDIKPENLLIGAQGELKIADFGWSVHTFNRRRTMCGTLDYLPPEMVESVEHDASVDIWSLGILCYEFLYGVPPFEAREHSETYKRIVQVDLKFPPKPIVSSSAKDLISQMLVKESTQRLALHKLLEHPWIVQNADPSGLYRG

SEQ ID NO: 11455 - DNA, 840 bp, Hordeum vulgare
  CDS (1)..(840)
atggagcggccagagtggagcctctctgacttcgagatcggcaagtgcatcggcgagggcaagttcggcaaggtctatatcgcccgcgagaagcagagcggctatgtggtggcgctcaaggtgacatacaaggagaagctgcagaagtaccggttccacgcgcacctgcggcgggaaatcgagatccagcatggcctcgaccatcccaacgtgctccgcctcttcgcctggttccacgacgccgagagagtcatccttgtgctcgagtacgccgcccgtggagagctctacaaggtcctccgcagtgtcgggcacttctcggagcggaccgccgccacctatgtagcaagcctttctggtgcactggcatactgtcacaagaagcaggtaattcacagggacatcaagccggaaaatctgctccttgatatcgagggccgacttaaaattgcagactttggatgggcggttcggtcaaatgctaaacgtcacacactctgtggcacaatagattacctggcaccagagatggtagagaaaaaggctcatgattacgctgttgacaactggactataggaatcctgtgctatgagtttttgtatggctcaccaccctttgaagctgaagaacagcaagatactctgatgaggatagtcaaagtggacttgctgttccctaaaactcatgacatatctgcagatgccaaggatcttatttgcaagctgctagtgaaggattcaagaaagaggatttctctcgatgatattttgaagcatccatggattgtaaagaatgcagaaccttcagggagttgcattgagcaaaaagctagtgcctaa

SEQ ID NO: 11456 - protein, 279 aa, Hordeum vulgare
MERPEWSLSDFEIGKCIGEGKFGKVYIAREKQSGYVVALKVTYKEKLQKYRFHAHLRREIEIQHGLDHPNVLRLFAWFHDAERVILVLEYAARGELYKVLRSVGHFSERTAATYVASLSGALAYCHKKQVIHRDIKPENLLLDIEGRLKIADFGWAVRSNAKRHTLCGTIDYLAPEMVEKKAHDYAVDNWTIGILCYEFLYGSPPFEAEEQQDTLMRIVKVDLLFPKTHDISADAKDLICKLLVKDSRKRISLDDILKHPWIVKNAEPSGSCIEQKASA

SEQ ID NO: 11457 - DNA, 876 bp, Hordeum vulgare
  CDS (1)..(876)
atggcgatctccacggattcgcgcagcgaggagaagccttcgcagcattctcaggaggagaagcggtgggtgttgtccgacttcgatgttgggaaagcacttgggaggggcaagtttggccatgtctacttggccagagagaagaggagtagtcacattgtagctttgaaagttcttttcaagagccaactgaagcaatcccaggtggagcatcagctgcggcgtgaagtagagatccagagtcaccttaggcaccccaatattcttcgcttatatgggtatttttatgatcagacccgtgtttacctaatcttggaacatgctgcaaaaggagagctctacaaggagttgcagagatgcaagcatttctctgaaagacgctccgcaacttacattgcatcattggcacgtgccctgatttatcttcacgggaagcacgtgatacatcgagatattaaaccggaaaaccttttagttggggtgcagggcgagctgaagattgctgacttcggctggtctgttcatacctttaaccgaaggaggacaatgtgtgggactttagattatctgcctcctgaaatggtggagaagacagagcacgattaccatgtagacatatggagcttgggcatcctatgttatgaattcctttatgggctcccaccttttgaagccaaagaacactctgagacatatcgaaggatagtaaaagtggatctgaagttcccgtcgaaaccgtttgtatctcctgctgcgaaggacctcatttcacagatgcttgtaaagaactcagctcaccgcctacccctccacaaggttctggagcacccctggatcgtccaaaacgctgacccctcgggcgtttacagagggtag

SEQ ID NO: 11458 - protein, 291 aa, Hordeum vulgare
MAISTDSRSEEKPSQHSQEEKRWVLSDFDVGKALGRGKFGHVYLAREKRSSHIVALKVLFKSQLKQSQVEHQLRREVEIQSHLRHPNILRLYGYFYDQTRVYLILEHAAKGELYKELQRCKHFSERRSATYIASLARALIYLHGKHVIHRDIKPENLLVGVQGELKIADFGWSVHTFNRRRTMCGTLDYLPPEMVEKTEHDYHVDIWSLGILCYEFLYGLPPFEAKEHSETYRRIVKVDLKFPSKPFVSPAAKDLISQMLVKNSAHRLPLHKVLEHPWIVQNADPSGVYRG

SEQ ID NO: 11459 - DNA, 879 bp, Helianthus annuus
  CDS (1)..(879)
atggcaatcgccacagacacgcagcttgcacaaaaggcttctacagaggcagcagccgaaaagaagagatggacacttaacgactttgacattgggaaaccactcggaagggggaaatttggtcatgtttatatagctaaggaaaagaggagcaaccatattgttgcactaaaggtgctattcaaaagccagctcaaacaatcacaagtcgagcaccaacttcgccgagaagtggaaatacaaagccatcttagacacccaaatatcctacgactctacggttacttctatgatcagaaaagagtctacctgattttggaaaatgctgccaaaggagaactctacaaggagttgcaaaggtgcaaatacttcagtgagcgccgtgctgctacctatattgcttcattagcgcgtgctcttatatattgtcatgggaagcatgttattcacagagatataaaaccggagaaccttttagttggtgcacagggtgacttaaagattgcggactttggttggtctgtgcacacattcaatcgtaggcagaccatgtgtggtacactagattatctcccgcctgagatggtggagagtgctgagcatgatgcaagtgtagacatatggagtcttggtattttgtgctatgaatttctctatgggattcctccatttgaagcaaaagaacactctgacacatatagaaggattttgctagtagatttgaagtttccgccaaaaccggtagtctcctcagctgccaaggatctaatcagtcagatgcttgttagagaaacttcaaagagattgcctttacacaagcttcttgagcatccatggataattcagaatgctgatccatcaggagtctacaagttttaa

SEQ ID NO: 11460 - protein, 292 aa, Helianthus annuus
MAIATDTQLAQKASTEAAAEKKRWTLNDFDIGKPLGRGKFGHVYIAKEKRSNHIVALKVLFKSQLKQSQVEHQLRREVEIQSHLRHPNILRLYGYFYDQKRVYLILENAAKGELYKELQRCKYFSERRAATYIASLARALIYCHGKHVIHRDIKPENLLVGAQGDLKIADFGWSVHTFNRRQTMCGTLDYLPPEMVESAEHDASVDIWSLGILCYEFLYGIPPFEAKEHSDTYRRILLVDLKFPPKPVVSSAAKDLISQMLVRETSKRLPLHKLLEHPWIIQNADPSGVYKF

SEQ ID NO: 11461 - DNA, 861 bp, Brassica napus
  CDS (1)..(861)
atgagtgagaaaccggaagaagatccttacgtccgcgaccccgagaagccattctccctcgcagatttcgagatcgggagacccttaggcaaaggcaaattcggcagagtctatctcgctcgcgaagtcaagagtcacttcgtggtggcgttgaaagtgatattcaaggagcagatcgagaagtacaaactccatcaccagctaagccgagagatggagatccaaacgagcctaaggcaccccaacatcctccgtctcttcggctggttcgacgacgacgagcggatcttcttgatcctcgagtacgctcacggcggtgagctctacggcctcctcaaaaagaacggtcatctcaccgaacaacaagccgccacttacatttcaagtctaagtcaagcactggcctattgtcatggaaaatgtgtgattcacagagacatcaaacccgaaaacctgttgctcgatcataagggaaggttgaaaattgcagattttgggtggtcagtgcagtcaagtaacaagaggaaaacaatgtgtgggacgttagattacttagcacctgagatggttgagaacaaagatcacgatcatgctgttgataactggactttagggatactgtgttacgagtttctctatggtaaccctccttttgaagctgagagtcagaaagatacattcaagagaattgttaagatcgatctgagttttcctgataatccaaatgtctcagcagaagctaagaatctaatcagtcagcttcttgttaaggatccttccaaaagactttctcttaccaagatcatgcaacacccgtggatcgtcaagaacgcagatcctaaaggtgtgtgcctcatttga

SEQ ID NO: 11462 - protein, 286 aa, Brassica napus
MSEKPEEDPYVRDPEKPFSLADFEIGRPLGKGKFGRVYLAREVKSHFVVALKVIFKEQIEKYKLHHQLSREMEIQTSLRHPNILRLFGWFDDDERIFLILEYAHGGELYGLLKKNGHLTEQQAATYISSLSQALAYCHGKCVIHRDIKPENLLLDHKGRLKIADFGWSVQSSNKRKTMCGTLDYLAPEMVENKDHDHAVDNWTLGILCYEFLYGNPPFEAESQKDTFKRIVKIDLSFPDNPNVSAEAKNLISQLLVKDPSKRLSLTKIMQHPWIVKNADPKGVCLI

SEQ ID NO: 11463 - DNA, 888 bp, Brassica napus
  CDS (1)..(888)
atggcgatcgctacggagaccaaacaccaggaggatagggaggcttcttcggatgctgctgcagttgcacaaaagagatggaatctgagtgattttgacattggcaaggctcttggtagaggcaagtttggtcacgtttatcttgctcgagaaaagcggagcaatcacattgtcgctctaaaggttcttttcaagtcccagcttcaagaatctcaagttgaacaccagctcagacgagaagttgagattcagtctcatcttaggcaccccaatatcctccggctttatggttatttctatgatcagaaaagagtttatttgatacttgagtatgctgctagaggtgagctttacaaggagcttcagaaatgcaagtacttcagcgagagacgagctgcaacttatgttgcatctttggcgagggctctcatctattgccatggcaagcatgtgatacacagagatatcaaaccagagaatctcttaatcggtgctcagggtgagctcaagattgcagactttggttggtcagtacacacatttaaccgcagaaggaccatgtgtggcacgcttgattaccttcctcctgagatggttgaaagcgtagagcatgatgcaagtgtagatatctggagcctagggattctctgttacgagtttctttatggcgttcctccttttgaagccgtggagcattcagacacatacagaaggattgtgcaagtggacctcaagttccctcctcaaccaattgtgtctccatctgcaaaggatcttattagccagatgcttgtcaaggagtctgcacaacgtctgccactgcacaaacttctcgagcatccatggattgtgcagaatgctgatccttctggaatctacagagcttga

SEQ ID NO: 11464 - protein, 295 aa, Brassica napus
MAIATETKHQEDREASSDAAAVAQKRWNLSDFDIGKALGRGKFGHVYLAREKRSNHIVALKVLFKSQLQESQVEHQLRREVEIQSHLRHPNILRLYGYFYDQKRVYLILEYAARGELYKELQKCKYFSERRAATYVASLARALIYCHGKHVIHRDIKPENLLIGAQGELKIADFGWSVHTFNRRRTMCGTLDYLPPEMVESVEHDASVDIWSLGILCYEFLYGVPPFEAVEHSDTYRRIVQVDLKFPPQPIVSPSAKDLISQMLVKESAQRLPLHKLLEHPWIVQNADPSGIYRA

SEQ ID NO: 11465 - DNA, 858 bp, Zea mays
  CDS (1)..(858)
atgccgacgagtgaggtgtggagcttgtccgatttcgaaatcagcaagtacatcggtgagggcaggttcggcaaggtctacctcgcccgcgagaagcagagcgggtacgtggtggcgctcaaggtgatatttaaggcgaaactgcagaagtaccacttccacgcgcacctgcggcgggagatcgagatccagcagagtctcgaccaccctaacgtgctccgcctcttcacctggttccacgacgaagagcgagtcgtcctcgtcctcgagtacgcggcccgtggcgagctctacaaggtccttcgcgctgctggccgcttcaccgagcgcacgtccgccacatatgtagcgagtcttgctggtgcactggcatactgtcacaaaaagcaagtcattcatagggacatcaagcctgagaatttgctaatcgacatcgagggccggcttaaaattgcagattttggatgggcggctcgttcaaatgctaaacgccacacactctgtggcacaatcgattatctggcaccagagatggtagagaaaaaagctcatgaccatgctgtggacaactggacattaggaatcctgtgctatgagttcttatatggttcacctccttttgaagctgatgaacaggatgataccttgagaaggatagttagggtggatttggcattcccttcatctccttgtgtatcttcagaggctaaggatctcatttccaagcttctagttaaggattcaagcaagaggctttgccttgaagacatcatgaagcatccatggataaagaagaatgcagacccttcaggcagttgcattaagcaaaaagatgtcacaagatcaaagcttctgtaa

SEQ ID NO: 11466 - protein, 285 aa, Zea mays
MPTSEVWSLSDFEISKYIGEGRFGKVYLAREKQSGYVVALKVIFKAKLQKYHFHAHLRREIEIQQSLDHPNVLRLFTWFHDEERVVLVLEYAARGELYKVLRAAGRFTERTSATYVASLAGALAYCHKKQVIHRDIKPENLLIDIEGRLKIADFGWAARSNAKRHTLCGTIDYLAPEMVEKKAHDHAVDNWTLGILCYEFLYGSPPFEADEQDDTLRRIVRVDLAFPSSPCVSSEAKDLISKLLVKDSSKRLCLEDIMKHPWIKKNADPSGSCIKQKDVTRSKLL

SEQ ID NO: 11467 - DNA, 879 bp, Zea mays
  CDS (1)..(879)
atggcgatcgccaccgagtcgcgcggcagcgaggacagggattcagcccatgcaaacgaggagaagcggtgggtgctgtctgatttcgaggttgggaagcctcttgggaggggcaaattcggccacgtatatcttgccagagaaaagaggagcaatcaaattgtggctttgaaagttcttttcaagagccagcttaagcaatcacaggtcgagcatcagctgcgacgcgaagtggagattcagagtcatcttcgtcatcctaatattcttcgcctgtatgggtacttctatgatcagacccgggtttacctaatcctggaatatgctgccaagggtgagctgtataaggaactgacaaggtgtaaacatttttctgagagacgttcagcaacttatattgcatcattggctagagctctgatctacctgcatgggaagcatgttatccatcgggacattaaaccagaaaatcttttggttggagcccagggcgagatcaaaatcgccgactttggctggtctgtgcataccttcaacagaagaaggactatgtgcggaactctggattacctgccacctgaaatggtggagaagacagaacatgattaccatgttgacatatggagcctgggtattctgtgttatgagttcctttacggggtcccaccttttgaagctaaggagcactcagaaacatacagaaggatagtaaaagtcgacttgaagttcccactgaaaccattcgtttcgcccgccgcaaaggatttgatttcccagatgctggtcaagaactcggcccagcggctgcctctccacaaggttcttgagcacccatggatcgtccagaacgccgacccttccggtgtgtgcagaggatag

SEQ ID NO: 11468 - protein, 292 aa, Zea mays
MAIATESRGSEDRDSAHANEEKRWVLSDFEVGKPLGRGKFGHVYLAREKRSNQIVALKVLFKSQLKQSQVEHQLRREVEIQSHLRHPNILRLYGYFYDQTRVYLILEYAAKGELYKELTRCKHFSERRSATYIASLARALIYLHGKHVIHRDIKPENLLVGAQGEIKIADFGWSVHTFNRRRTMCGTLDYLPPEMVEKTEHDYHVDIWSLGILCYEFLYGVPPFEAKEHSETYRRIVKVDLKFPLKPFVSPAAKDLISQMLVKNSAQRLPLHKVLEHPWIVQNADPSGVCRG

SEQ ID NO: 11469 - DNA, 825 bp, Glycine max
  CDS (1)..(825)
atgtgcacagccctaaagacgaattaccagcttagcgaggagatcggtcgcggtcgtttcggcaccatcttccgctgcttccacccactctccaacgaaccctacgcctgcaaactcatcgacaaatccctcctccatgactccaccgaccgcgactgcctccagaacgaacccaaattcatgaccctcctttcacctcacccaaacatccttcaaatcttccatgttttcgaggacgaccaatatctctccatagtaatggatctctgccaaccccacacgcttttcgaccgcatggtcgatggtcccatccaggagtcccaagccgccgccctcatgaagaaccttctggaagctgtcgcgcactgccaccgcctcggcgtggcccaccgcgacattaaacccgacaatattctgttcgattcggcggacaatcttaaactggcggacttcggttccgcggagtggtttggggatgggaggagcatgagcggcgtggtggggacgccgtattacgtggcgccggaggttctgttggggagggagtacgatgagaaggttgatgtgtggagctgtggggtgattttgtatataatgttggcggggattccccctttttacggagattctgcggcggagatctttgaggctgtggttagggctaatcttaggttcccttctagaatcttccggacagtgtcccccgccgccaaggatctcttgcgaaaaatgatctgtagggattcttctagaaggttctccgcagaacaagccttgagacatccttggatcttgagtgcgggtgacacggctgaactcacttga

SEQ ID NO: 11470 - protein, 274 aa, Glycine max
MCTALKTNYQLSEEIGRGRFGTIFRCFHPLSNEPYACKLIDKSLLHDSTDRDCLQNEPKFMTLLSPHPNILQIFHVFEDDQYLSIVMDLCQPHTLFDRMVDGPIQESQAAALMKNLLEAVAHCHRLGVAHRDIKPDNILFDSADNLKLADFGSAEWFGDGRSMSGVVGTPYYVAPEVLLGREYDEKVDVWSCGVILYIMLAGIPPFYGDSAAEIFEAVVRANLRFPSRIFRTVSPAAKDLLRKMICRDSSRRFSAEQALRHPWILSAGDTAELT

SEQ ID NO: 11471 - DNA, 861 bp, Brassica napus
  CDS (1)..(861)
atgagtgagaaaccggaagaagatccttacgtccgcgaccccgagaagccattctccctcgcagatttcgagatcgggagacccttaggcaaaggcaaattcggcagagtctatctcgctcgcgaagtcaagagtcacttcgtggtggcgttgaaagtgatattcaaggagcagatcgagaagtacaaactccatcaccagctaagccgagagatggagatccaaacgagcctaaggcaccccaacatcctccgtctcttcggctggttcgacgacgacgagcggatcttcttgatcctcgagtacgctcacggcggtgagctctacggtctcctcaaaaagaacggtcatctcaccgaacaacaagccgccacttacatttcaagtctaagtcaagcactggcttattgtcatggaaagtgtgtgattcacagagatatcaaacctgaaaaccttttgctcgatcatgagggaaggttgaagattgctgattttgggtggtcagtgcagtcgagtaacaagaggaagacaatgtgtgggactttagattacttagcacctgagatggttgagaacaaagatcacgatcatgctgttgataactggactttagggatactgtgttacgagtttctctatggtaaccctccttttgaagctgagagtcagaaagatacattcaagagaattgttaagatcgatctgagttttcctgataatccaaatgtctcagcagaagctaagaatctaatcagtcagcttcttgttaaggatccttccaaaagactttctcttaccaagatcatgcaacacccgtggatcgtcaagaacgcagatcctaaaggtgtgtgcctcatttga

SEQ ID NO: 11472 - protein, 286 aa, Brassica napus
MSEKPEEDPYVRDPEKPFSLADFEIGRPLGKGKFGRVYLAREVKSHFVVALKVIFKEQIEKYKLHHQLSREMEIQTSLRHPNILRLFGWFDDDERIFLILEYAHGGELYGLLKKNGHLTEQQAATYISSLSQALAYCHGKCVIHRDIKPENLLLDHEGRLKIADFGWSVQSSNKRKTMCGTLDYLAPEMVENKDHDHAVDNWTLGILCYEFLYGNPPFEAESQKDTFKRIVKIDLSFPDNPNVSAEAKNLISQLLVKDPSKRLSLTKIMQHPWIVKNADPKGVCLI

SEQ ID NO: 11473 - DNA, 876 bp, Triticum aestivum
  CDS (1)..(876)
atggcgatctccaccgattcgcgcagcgaggagaagccttcgcagcattctcaggtggagaagcggtgggtgttgtctgactttgacgttgggaaggcacttgggaggggcaagtttggccatgtctacttggccagagaaaagaggagtagtcagattgtggctttgaaagttcttttcaagagccaactcaaacaatctcaggtggagcatcagttacggcgcgaagtagagatacagagtcaccttaggcaccccaatattcttcgcctatatgggtatttttatgatcagacccgtgtttacctaatcttggagcatgccgcaaaaggagagctgtacaaggagttgcagagatgcaagcatttttctgaaagacgctcggcaacttacattgcatcattggcccgtgccctcatctatcttcacgggaagcacgtgatacatcgagatattaaaccggaaaaccttttagttggagtacagggagagctgaagattgcagactttggctggtctgttcataccttcaaccgaagaaggacaatgtgtgggactttagattatctgcctcctgaaatggtggagaagacagagcacgattaccatgtagacatatggagcttgggcatcctatgttatgaattcctttatgggctcccaccttttgaagccaaagaacactccgagacatatcgaaggatagtaaaagtggacctgaagttcccgttgaaaccgtttgtgtctcctgctgcgaaggacctcatctcacagatgctggtgaagaattcagcgcatcgcctgcccctccataaggttctggagcacccctggatcgtccaaaacgccgacccctcaggcgtgtacagggggtag

SEQ ID NO: 11474 - protein, 291 aa, Triticum aestivum
MAISTDSRSEEKPSQHSQVEKRWVLSDFDVGKALGRGKFGHVYLAREKRSSQIVALKVLFKSQLKQSQVEHQLRREVEIQSHLRHPNILRLYGYFYDQTRVYLILEHAAKGELYKELQRCKHFSERRSATYIASLARALIYLHGKHVIHRDIKPENLLVGVQGELKIADFGWSVHTFNRRRTMCGTLDYLPPEMVEKTEHDYHVDIWSLGILCYEFLYGLPPFEAKEHSETYRRIVKVDLKFPLKPFVSPAAKDLISQMLVKNSAHRLPLHKVLEHPWIVQNADPSGVYRG

SEQ ID NO: 11475 - DNA, 879 bp, Zea mays
  CDS (1)..(879)
atggcgatcgccaccgagtcgcgcggctgcgaggacagggattcagcccatgcaaacgaggagaagcggtgggtgctgtctgatttcgaggttgggaagcctcttgggaggggcaaattcggccacgtatatcttgccagagaaaagaggagcaatcaaattgtggctttgaaagttcttttcaagagccagcttaagcaatcacaggtcgagcatcagctgcgacgcgaagtggagattcagagtcatcttcgtcatcctaatattcttcgcctgtatgggtacttctatgatcagacccgggtttacctaatcttggaatatgctgccaagggtgagctgtataaggaactgacaaggtgtaaacatttttctgagagacgttcagcaacttatattgcatcattggctagagctctgatctacctgcatgggaagcatgttatccatcgggacattaaaccagaaaatcttttggttggagcccagggcgagatcaaaatcgccgactttggctggtctgtgcataccttcaacagaagaaggactatgtgcggaactctggattacctgccacctgaaatggtggagaagacagaacatgattaccatgttgacatatggagcctgggtattctgtgttatgagttccttcatggggtcccaccttttgaagctaaggagcactcagaaacatacagaaggatagtaaaagtcgacttgaagttcccactgaaaccattcgtttcgcccgccgcaaaggatttgatttcccagatgctggtcaagaactcggcccagcggctgcctctccacaaggttcttgagcacccatggatcgtccagaacgccgacccttccggtgtgtgcagaggatag

SEQ ID NO: 11476 - protein, 292 aa, Zea mays
MAIATESRGCEDRDSAHANEEKRWVLSDFEVGKPLGRGKFGHVYLAREKRSNQIVALKVLFKSQLKQSQVEHQLRREVEIQSHLRHPNILRLYGYFYDQTRVYLILEYAAKGELYKELTRCKHFSERRSATYIASLARALIYLHGKHVIHRDIKPENLLVGAQGEIKIADFGWSVHTFNRRRTMCGTLDYLPPEMVEKTEHDYHVDIWSLGILCYEFLHGVPPFEAKEHSETYRRIVKVDLKFPLKPFVSPAAKDLISQMLVKNSAQRLPLHKVLEHPWIVQNADPSGVCRG

SEQ ID NO: 11477 - DNA, 858 bp, Zea mays
  CDS (1)..(858)
atgccgacgagtgaggtgtggagcttgtccgatttcgaaatcagcaagtacatcgctgagggcaggttcggcaaggtctacctcgcccgcgagaagcagagcgggtacgtggtggcgctcaaggtgatatttaaggcgaaactgaagaagcaccacttccacgcgcacctgcggcgggagatcgagatccagcagagtctcgaccaccctaacgtgctccgcctcttcacctggttccacgacgaagagcgagtcgtcctcgtcctcgagtacgcggcccgtggcgagctctacaaggtccttcgcgctgctggccgcttcaccgagcgcacgtccgccacatatgtagcgagtcttgctggtgcactggcatactgtcacaaaaagcaagtcattcatagggacatcaagcctgagaatttgctaatcgacatcgagggccggcttaaaattgcagattttggatgggcggctcgttcaaatgctaaacgccacacactctgtggcacaatcgattatctggcaccagagatggtagagaaaaaagctcatgaccatgctgtggacaactggacattaggaatcctgtgctatgagttcttatatggttcacctccttttgaagctgatgaacaggatgataccttgagaaggatagttagggtggatttggcattcccttcatctccttgtgtatcttcagaggctaaggatctcatttccaagcttctagttaaggattcaagcaagaggctttgccttgaagacatcatgaagcatccatggataaagaagaatgcagacccttcaggcagttgcattaagcaaaaagatgtcacaagatcaaagcttctgtaa

SEQ ID NO: 11478 - protein, 285 aa, Zea mays
MPTSEVWSLSDFEISKYIAEGRFGKVYLAREKQSGYVVALKVIFKAKLKKHHFHAHLRREIEIQQSLDHPNVLRLFTWFHDEERVVLVLEYAARGELYKVLRAAGRFTERTSATYVASLAGALAYCHKKQVIHRDIKPENLLIDIEGRLKIADFGWAARSNAKRHTLCGTIDYLAPEMVEKKAHDHAVDNWTLGILCYEFLYGSPPFEADEQDDTLRRIVRVDLAFPSSPCVSSEAKDLISKLLVKDSSKRLCLEDIMKHPWIKKNADPSGSCIKQKDVTRSKLL

SEQ ID NO: 11479 - DNA, 930 bp, Zea mays
  CDS (1)..(930)
atgccgacgagtgaggtgtggagcttgtccgattttgaaatcagcaagtacatcgctgagggcaggttcggcaaggtctacctcgcccgcgagaagcagagcgggtacgtggtggcgctcaaggtgatatttaaggcgaaactgaagaagcaccgcttccacgcgcacctacggcgggagatcgagatccagcagagtctcgaccaccctaacgtgctccgcctcttcacctggttccacgacgaagagcgagtcgtcctcgtcctcgagtacgcggcccgtggcgagctctacaaggtccttcgcgctgctggccgcttcaccgagcgcacgtccgccacatatgtagcgagtcttgctggtgcactggcatactgtcacaaaaagcaagtcattcatagggacatcaagcctgagaatttgctaatcgacatcgagagaacgatccggtcgaagagcccgaggaattcgcaggagaagcccctgagcagcagtcgtttggtggagggccggcttaaaattgcagattttggatgggcggctcgttcaaatgctaaacgccacacactctgtggcacaatcgattatctggcaccagagatggtagagaaaaaagctcatgaccatgctgtggacaactggacattaggaatcctgtgctatgagttcttatatggttcacctccttttgaagctgatgaacaggatgataccttgagaaggatagttagggtggatttggcattcccttcatctccttgtgtatcttcagaggctaaggatctcatttccaagcttctagttaaggattcaagcaagaggctttgccttgaagacatcatgaagcatccatggataaagaagaatgcagacccttcaggcagttgcattaagcaaaaagatgtcacaagatcaaaggtaaaacgataa

SEQ ID NO: 11480 - protein, 309 aa, Zea mays
MPTSEVWSLSDFEISKYIAEGRFGKVYLAREKQSGYVVALKVIFKAKLKKHRFHAHLRREIEIQQSLDHPNVLRLFTWFHDEERVVLVLEYAARGELYKVLRAAGRFTERTSATYVASLAGALAYCHKKQVIHRDIKPENLLIDIERTIRSKSPRNSQEKPLSSSRLVEGRLKIADFGWAARSNAKRHTLCGTIDYLAPEMVEKKAHDHAVDNWTLGILCYEFLYGSPPFEADEQDDTLRRIVRVDLAFPSSPCVSSEAKDLISKLLVKDSSKRLCLEDIMKHPWIKKNADPSGSCIKQKDVTRSKVKR

SEQ ID NO: 11481 - DNA, 891 bp, Zea mays
  CDS (1)..(891)
atggcggtcgccaccgagtcgcgcggcagcgaggacagggcttcagcccatgcgaaccaggagaagcggtgggtgctgtctgatttcgaggttgggaaacctcttgggaggggcaagtttggccatgtttatcttgccagagaaaaaaggagtagtgagattgtggctttgaaagttcttttcaagagccagctcaagcaatcacaggttgagcatcagctgcgacgtgaagtggagattcagagtcatcttcgtcatcctaatattcttcgcctgtatgggtacttctatgatcagaccagggtttacctaatcctggaatacgctgccaagggtgaactgtataaggaactgacaaggtgtaaacatttttcagagcgacgcacagcgacttatgtcgcttcgttggctagagctttgatctaccttcatggcaagcatgttatccatcgggacattaaaccagagaatcttttagttggagttcagggcgagatcaaaattgccgactttggctggtctgtgcacaccttcaacagaagacggactatgtgcggaactctggattacctgccccctgaaatggtggagaaggcagaacatgattaccatgttgatatatggagccttggtgttctgtgctatgagttcctttacggggtcccccctttcgaagctaaggagcactcagaaacctacagaaggatagtgaaagtcgacttgaagttcccactgaaaccattcgtttcccctgccgcaaaggacttgatttctcagatgctggtcaagagctcggcgcagcggctgcctctccccaaggttcttgagcacccgtggatcgtccagaacgccgacccttccggcgtgtacagagaaggtagatccgtctaa

SEQ ID NO: 11482 - protein, 296 aa, Zea mays
MAVATESRGSEDRASAHANQEKRWVLSDFEVGKPLGRGKFGHVYLAREKRSSEIVALKVLFKSQLKQSQVEHQLRREVEIQSHLRHPNILRLYGYFYDQTRVYLILEYAAKGELYKELTRCKHFSERRTATYVASLARALIYLHGKHVIHRDIKPENLLVGVQGEIKIADFGWSVHTFNRRRTMCGTLDYLPPEMVEKAEHDYHVDIWSLGVLCYEFLYGVPPFEAKEHSETYRRIVKVDLKFPLKPFVSPAAKDLISQMLVKSSAQRLPLPKVLEHPWIVQNADPSGVYREGRSV

SEQ ID NO: 11483 - DNA, 858 bp, Zea mays
  CDS (1)..(858)
atgccgacgagtgaggtgtggagcttgtccgattttgaaatcagcaagtacatcgctgagggcaggttcggcaaggtctacctcgcccgcgagaagcagagcgggtacgtggtggcgctcaaggtgatatttaaggcgaaactgaagaagcaccgcttccacgcgcacctacggcgggagatcgagatccagcagagtctcgaccaccctaacgtgctccgcctcttcacctggttccacgacgaagagcgagtcgtcctcgtcctcgagtacgcggcccgtggcgagctctacaaggtccttcgcgctgctggccgcttcaccgagcgcacgtccgccacatatgtagcgagtcttgctggtgcactggcatactgtcacaaaaagcaagtcattcatagggacatcaagcctgagaatttgctaatcgacatcgagggccggcttaaaattgcagattttggatgggcggctcgttcaaatgctaaacgccacacactctgtggcacaatcgattatctggcaccagagatggtagagaaaaaagctcatgaccatgctgtggacaactggacattaggaatcctgtgctatgagttcttatatggttcacctccttttgaagctgatgaacaggatgataccttgagaaggatagttagggtggatttggcattcccttcatctccttgtgtatcttcagaggctaaggatctcatttccaagcttctagttaaggattcaagcaagaggctttgccttgaagacatcatgaagcatccatggataaagaagaatgcagacccttcaggcagttgcattaagcaaaaagatgtcacaagatcaaagcttctgtaa

SEQ ID NO: 11484 - protein, 285 aa, Zea mays
MPTSEVWSLSDFEISKYIAEGRFGKVYLAREKQSGYVVALKVIFKAKLKKHRFHAHLRREIEIQQSLDHPNVLRLFTWFHDEERVVLVLEYAARGELYKVLRAAGRFTERTSATYVASLAGALAYCHKKQVIHRDIKPENLLIDIEGRLKIADFGWAARSNAKRHTLCGTIDYLAPEMVEKKAHDHAVDNWTLGILCYEFLYGSPPFEADEQDDTLRRIVRVDLAFPSSPCVSSEAKDLISKLLVKDSSKRLCLEDIMKHPWIKKNADPSGSCIKQKDVTRSKLL

SEQ ID NO: 11485 - DNA, 20 bp, Artificial sequence
  primer
atggcgattgcttcagatac

SEQ ID NO: 11486 - DNA, 20 bp, Artificial sequence
  primer
tcaacccctaaagatgccag

SEQ ID NO: 11487 - protein, 346 aa, Artificial sequence
  consensus sequence
  Variant (2)..(3): Xaa in position 2 to 3 is any amino acid
  Variant (5)..(5): Xaa in position 5 is any amino acid
  Variant (8)..(9): Xaa in position 8 to 9 is any amino acid
  Variant (12)..(12): Xaa in position 12 is any amino acid
  Variant (17)..(17): Xaa in position 17 is any amino acid
  Variant (24)..(25): Xaa in position 24 to 25 is any amino acid
  Variant (26)..(26): Xaa in position 26 is any or no amino acid
  Variant (28)..(31): Xaa in position 28 to 31 is any amino acid
  Variant (36)..(37): Xaa in position 36 to 37 is any amino acid
  Variant (39)..(40): Xaa in position 39 to 40 is any amino acid
  Variant (42)..(48): Xaa in position 42 to 48 is any amino acid
  Variant (49)..(49): Xaa in position 49 is any or no amino acid
  Variant (51)..(51): Xaa in position 51 is any amino acid
  Variant (55)..(55): Xaa in position 55 is any amino acid
  Variant (59)..(60): Xaa in position 59 to 60 is any amino acid
  Variant (62)..(62): Xaa in position 62 is any amino acid
  Variant (66)..(66): Xaa in position 66 is any amino acid
  Variant (70)..(70): Xaa in position 70 is any amino acid
  Variant (72)..(72): Xaa in position 72 is any amino acid
  Variant (74)..(74): Xaa in position 74 is any amino acid
  Variant (76)..(77): Xaa in position 76 to 77 is any amino acid
  Variant (79)..(80): Xaa in position 79 to 80 is any amino acid
  Variant (85)..(85): Xaa in position 85 is any amino acid
  Variant (87)..(88): Xaa in position 87 to 88 is any amino acid
  Variant (94)..(94): Xaa in position 94 is any amino acid
  Variant (96)..(99): Xaa in position 96 to 99 is any amino acid
  Variant (100)..(102): Xaa in position 100 to 102 is any or no amino acid
  Variant (104)..(104): Xaa in position 104 is any amino acid
  Variant (106)..(108): Xaa in position 106 to 108 is any amino acid
  Variant (110)..(110): Xaa in position 110 is any amino acid
  Variant (112)..(115): Xaa in position 112 to 115 is any amino acid
  Variant (117)..(117): Xaa in position 117 is any amino acid
  Variant (120)..(120): Xaa in position 120 is any amino acid
  Variant (122)..(122): Xaa in position 122 is any amino acid
  Variant (124)..(124): Xaa in position 124 is any amino acid
  Variant (126)..(126): Xaa in position 126 is any amino acid
  Variant (137)..(137): Xaa in position 137 is any amino acid
  Variant (139)..(142): Xaa in position 139 to 142 is any amino acid
  Variant (143)..(165): Xaa in position 143 to 165 is any or no amino acid
  Variant (167)..(168): Xaa in position 167 to 168 is any amino acid
  Variant (171)..(171): Xaa in position 171 is any amino acid
  Variant (178)..(182): Xaa in position 178 to 182 is any amino acid
  Variant (183)..(206): Xaa in position 183 to 206 is any or no amino acid
  Variant (208)..(208): Xaa in position 208 is any amino acid
  Variant (210)..(210): Xaa in position 210 is any amino acid
  Variant (218)..(218): Xaa in position 218 is any amino acid
  Variant (222)..(230): Xaa in position 222 to 230 is any amino acid
  Variant (231)..(236): Xaa in position 231 to 236 is any or no amino acid
  Variant (239)..(239): Xaa in position 239 is any amino acid
  Variant (241)..(241): Xaa in position 241 is any amino acid
  Variant (244)..(244): Xaa in position 244 is any amino acid
  Variant (246)..(246): Xaa in position 246 is any amino acid
  Variant (251)..(251): Xaa in position 251 is any amino acid
  Variant (253)..(254): Xaa in position 253 to 254 is any amino acid
  Variant (258)..(262): Xaa in position 258 to 262 is any amino acid
  Variant (263)..(265): Xaa in position 263 to 265 is any or no amino acid
  Variant (267)..(268): Xaa in position 267 to 268 is any amino acid
  Variant (271)..(273): Xaa in position 271 to 273 is any amino acid
  Variant (275)..(277): Xaa in position 275 to 277 is any amino acid
  Variant (279)..(280): Xaa in position 279 to 280 is any amino acid
  Variant (281)..(284): Xaa in position 281 to 284 is any or no amino acid
  Variant (287)..(288): Xaa in position 287 to 288 is any amino acid
  Variant (290)..(290): Xaa in position 290 is any amino acid
  Variant (294)..(296): Xaa in position 294 to 296 is any amino acid
  Variant (297)..(326): Xaa in position 297 to 326 is any or no amino acid
  Variant (329)..(329): Xaa in position 329 is any amino acid
  Variant (330)..(333): Xaa in position 330 to 333 is any or no amino acid
  Variant (335)..(336): Xaa in position 335 to 336 is any amino acid
  Variant (338)..(342): Xaa in position 338 to 342 is any amino acid
LXXFXIGXXLGXGKFGXVYLAREXXXSXXXXALKVXXKXXLXXXXXXXXQXRREXEIQXXLXHPNXLRLXGXFXDXXRXXLILEXAXXGELYKXLXXXXXXXFXEXXXAXYXXXXAXALXYXHXKXVIHRDIKPENXLXXXXXXXXXXXXXXXXXXXXXXXXXXXGXXKIXDFGWSVXXXXXXXXXXXXXXXXXXXXXXXXXXXXXRXTXCGTLDYLXPEMXXXXXXXXXXXXXXXVDXWXLGXLXYEFLXGXXPFEXXXXXXXXTXXRIXXXDXXXPXXXXXXVSXXAXDLIXXXXXXXXXXXXXXXXXXXXXXXXXXXXXXXXXLVXXXXXRXXLXXXXXHPWI

SEQ ID NO: 11488 - protein, 41 aa, Artificial sequence
  protein pattern
  Variant (4)..(4): Xaa in position 4 is Ile, Met or Val
  Variant (8)..(9): Xaa in position 8 to 9 is any amino acid
  Variant (11)..(11): Xaa in position 11 is any amino acid
  Variant (14)..(14): Xaa in position 14 is any amino acid
  Variant (15)..(15): Xaa in position 15 is Ile or Val
  Variant (17)..(17): Xaa in position 17 is any amino acid
  Variant (18)..(18): Xaa in position 18 is Leu or Met
  Variant (19)..(19): Xaa in position 19 is Phe or Tyr
  Variant (20)..(20): Xaa in position 20 is Ala, Gly, Asn or Thr
  Variant (21)..(21): Xaa in position 21 is His, Trp or Tyr
  Variant (23)..(23): Xaa in position 23 is any amino acid
  Variant (25)..(26): Xaa in position 25 to 26 is any amino acid
  Variant (27)..(27): Xaa in position 27 is Lys or Arg
  Variant (28)..(28): Xaa in position 28 is Ile or Val
  Variant (29)..(29): Xaa in position 29 is any amino acid
  Variant (31)..(31): Xaa in position 31 is Ile, Met or Val
  Variant (34)..(34): Xaa in position 34 is any amino acid
  Variant (36)..(37): Xaa in position 36 to 37 is any amino acid
  Variant (40)..(40): Xaa in position 40 is Leu or Met
  Variant (41)..(41): Xaa in position 41 is Phe or Tyr
RREXEIQXXLXHPXXLXXXXXFXDXXXXXLXLEXAXXGEXX

SEQ ID NO: 11489 - protein, 28 aa, Artificial sequence
  protein pattern
  Variant (2)..(2): Xaa in position 2 is Ile or Met
  Variant (11)..(11): Xaa in position 11 is Ile or Leu
  Variant (13)..(13): Xaa in position 13 is any amino acid
  Variant (14)..(16): Xaa in position 14 to 16 is any or no amino acid
  Variant (18)..(18): Xaa in position 18 is any amino acid
  Variant (19)..(19): Xaa in position 19 is Ile or Leu
  Variant (22)..(22): Xaa in position 22 is Ala, Gly or Ser
  Variant (27)..(27): Xaa in position 27 is Ala or Ser
  Variant (28)..(28): Xaa in position 28 is Ala or Val
VXHRDIKPENXLXXXXGXXKIXDFGWXX

SEQ ID NO: 11490 - protein, 23 aa, Artificial sequence
  protein pattern
  Variant (3)..(3): Xaa in position 3 is any amino acid
  Variant (5)..(5): Xaa in position 5 is Ala, Ser or Thr
  Variant (8)..(8): Xaa in position 8 is Ile or Val
  Variant (10)..(10): Xaa in position 10 is any amino acid
  Variant (15)..(15): Xaa in position 15 is any amino acid
  Variant (17)..(17): Xaa in position 17 is any amino acid
  Variant (18)..(18): Xaa in position 18 is any or no amino acid
  Variant (20)..(20): Xaa in position 20 is any or no amino acid
  Variant (23)..(23): Xaa in position 23 is Ala, Asp, Glu or Thr
VDXWXLGXLXYEFLXGXXPXFEX

SEQ ID NO: 11491 - protein, 17 aa, Artificial sequence
  protein pattern
  Variant (2)..(2): Xaa in position 2 is any amino acid
  Variant (4)..(4): Xaa in position 4 is Ile, Leu or Met
  Variant (12)..(12): Xaa in position 12 is any or no amino acid
  Variant (14)..(14): Xaa in position 14 is any or no amino acid
  Variant (17)..(17): Xaa in position 17 is Ile, Leu or Val
RXTXCGTLDYLXPXEMX

SEQ ID NO: 11492 - protein, 20 aa, Artificial sequence
  protein pattern
  Variant (2)..(2): Xaa in position 2 is Asp or Glu
  Variant (3)..(3): Xaa in position 3 is Ile or Val
  Variant (4)..(4): Xaa in position 4 is Gly or Ser
  Variant (5)..(5): Xaa in position 5 is Lys or Arg
  Variant (6)..(6): Xaa in position 6 is any amino acid
  Variant (7)..(7): Xaa in position 7 is Ile or Leu
  Variant (8)..(8): Xaa in position 8 is Ala or Gly
  Variant (9)..(9): Xaa in position 9 is Glu, Lys or Arg
  Variant (11)..(11): Xaa in position 11 is Lys or Arg
  Variant (14)..(14): Xaa in position 14 is any amino acid
  Variant (19)..(19): Xaa in position 19 is Lys or Arg
FXXXXXXXXGXFGXVYLAXE

SEQ ID NO: 11493 - protein, 31 aa, Artificial sequence
  protein pattern
  Variant (2)..(3): Xaa in position 2 to 3 is any amino acid
  Variant (5)..(5): Xaa in position 5 is any amino acid
  Variant (6)..(6): Xaa in position 6 is Asp or Asn
  Variant (9)..(10): Xaa in position 9 to 10 is any amino acid
  Variant (11)..(11): Xaa in position 11 is Leu or Met
  Variant (13)..(15): Xaa in position 13 to 15 is any amino acid
  Variant (16)..(16): Xaa in position 16 is Pro, Ser or Thr
  Variant (17)..(18): Xaa in position 17 to 18 is any amino acid
  Variant (20)..(20): Xaa in position 20 is Phe, Ile or Leu
  Variant (21)..(21): Xaa in position 21 is any amino acid
  Variant (22)..(22): Xaa in position 22 is Ile or Leu
  Variant (23)..(24): Xaa in position 23 to 24 is any amino acid
  Variant (25)..(25): Xaa in position 25 is Ile, Leu, Met or Val
  Variant (26)..(27): Xaa in position 26 to 27 is any amino acid
SXXAXXLIXXXLXXXXXXRXXXXXXXXHPWI

SEQ ID NO: 11494 - protein, 18 aa, Artificial sequence
  protein pattern
  Variant (2)..(2): Xaa in position 2 is Asp, Asn, Pro, Ser or Thr
  Variant (4)..(5): Xaa in position 4 to 5 is any amino acid
  Variant (6)..(6): Xaa in position 6 is any or no amino acid
  Variant (8)..(8): Xaa in position 8 is any amino acid
  Variant (9)..(9): Xaa in position 9 is any or no amino acid
  Variant (11)..(11): Xaa in position 11 is Ile or Val
  Variant (12)..(12): Xaa in position 12 is any amino acid
  Variant (13)..(13): Xaa in position 13 is Gln or Ser
  Variant (14)..(14): Xaa in position 14 is Ile, Leu or Met
  Variant (15)..(15): Xaa in position 15 is Ala or Ser
  Variant (16)..(16): Xaa in position 16 is any amino acid
FXEXXXAXXYXXXXXXAL

SEQ ID NO: 11495 - protein, 13 aa, Artificial sequence
  protein pattern
  Variant (2)..(2): Xaa in position 2 is any amino acid
  Variant (3)..(3): Xaa in position 3 is Lys or Arg
  Variant (6)..(7): Xaa in position 6 to 7 is any amino acid
  Variant (8)..(8): Xaa in position 8 is Ala, Gly, Ile or Val
  Variant (10)..(10): Xaa in position 10 is Ile, Leu or Met
  Variant (11)..(11): Xaa in position 11 is any amino acid
  Variant (12)..(12): Xaa in position 12 is Phe, Ile or Val
TXXRIXXXDXXXP

SEQ ID NO: 11496 - DNA, 741 bp, Saccharomyces cerevisiae
  CDS (1)..(741)
atgagcaaagacaaagatatcaaagtcactcctggaacttgtgaattagttgaacaaatactcgccttactctcccggtatctctcatcttatattcacgtgctgaacaagttcatcagtcatttgcgaagggtagctacgctacgattcgagagaactactttgattaaatttgttaagaaattgagattttacaacgattgtgtgttaagctataatgcatcagagtttatcaatgaaggtaaaaacgaattagacccagaggcggattcgtttgacaaggtaattttaccaatagcttcaatgtttgttaaatgtgttgaaacgtttgacttactgaactattatctaacgcagtcattacaaaaggaaattttatctaaaactttgaacgaggacctaacgctaacagcagagtccatattagccattgacgatacctacaatcatttcgtgaaattttctcaatggatgattgagtctttgcgtataggcagcaacctgctagatttagaagttgttcaatttgccattaaatgcgcagatgaggacggaacgaatatcggagaaactgataatatcttcttgcaggagattcttcctgtcaactccgaagaagaatttcagaccttgtcagctgcgtggcactccattttagatggtaagctgagcgccttggacgaagaatttgatgttgtcgctactaaatggcatgacaaatttggtaaattgaaaaactga

SEQ ID NO: 11497 - protein, 246 aa, Saccharomyces cerevisiae
MSKDKDIKVTPGTCELVEQILALLSRYLSSYIHVLNKFISHLRRVATLRFERTTLIKFVKKLRFYNDCVLSYNASEFINEGKNELDPEADSFDKVILPIASMFVKCVETFDLLNYYLTQSLQKEILSKTLNEDLTLTAESILAIDDTYNHFVKFSQWMIESLRIGSNLLDLEVVQFAIKCADEDGTNIGETDNIFLQEILPVNSEEEFQTLSAAWHSILDGKLSALDEEFDVVATKWHDKFGKLKN

SEQ ID NO: 11498 - DNA, 741 bp, Saccharomyces pastorianus
  CDS (1)..(741)
atgagtacagataaagagattagggtttcacctggtatctgtacaaaagttgagcaaatattagacttgatctcccgttatttgtcatcttacattcatgttctgaacaagtttatcagtcatttacgcagagtggccacgctacgattcgaaagaactactttaattaaatttgttaaaaaattaagattttacaatgattgtgtactaaactacaatgcatcagactttatcaatgaaggtacaaacgaatcgggttcagatgccgaccctctggataaggtcatcttaccaatagcttcgatgtttgtcaaatgcgtcgaaacatttgatttactgaactattatctaacacaatcgttacaaaaggaaattatatctaagactttgaatgaagatctgacgctaacgactgaatctatattagctattgacgatacttacaatcattttgtgaagttttcccaatggatgattgaatcattgcgcattggcagcaacttgctagatttggaagtggtacaatttgtcattaaatgtgctgatgaagacggtacaaacaccggagaaactgacaatatcttcttacaggaaattgttcctgtcaattcagaagaagaatttttctctttgtcagctgcatggcactctatcttagatggtaaactaaatattatggatcaagagttcgatgtcgtcgccactaaatggcacgacaaatttggtaagttgaaaaattga

SEQ ID NO: 11499 - protein, 246 aa, Saccharomyces pastorianus
MSTDKEIRVSPGICTKVEQILDLISRYLSSYIHVLNKFISHLRRVATLRFERTTLIKFVKKLRFYNDCVLNYNASDFINEGTNESGSDADPLDKVILPIASMFVKCVETFDLLNYYLTQSLQKEIISKTLNEDLTLTTESILAIDDTYNHFVKFSQWMIESLRIGSNLLDLEVVQFVIKCADEDGTNTGETDNIFLQEIVPVNSEEEFFSLSAAWHSILDGKLNIMDQEFDVVATKWHDKFGKLKN

SEQ ID NO: 11500 - DNA, 735 bp, Candida glabrata CBS 138
  CDS (1)..(735)
atgtctagagaagaacagccctatattgttgccactgatggtattgtcgatgctctaacaaaaatatcatctgttttttcagcgtatttatctgcaaatattcatattttaaacaagtatatcaattatctgcgcagagtgactagtttgaaaaatgaaaggtctataatgataaaaatagtcaagaagctgcggtttttcaatgatacattgctttccactgatttggcacaactgcagactacatatgaaggagaggaacctgaactggctctcaatattcaaacattcgcatcttatttggttaagtgtttggagacaattgatcttttaaattattttcttttaaagcctctacagaaagagttgatagccaagacattaaactttgatttggtatttccggaagacataactgatactgttgaagacacatacaaccattttgtaaaatttactcaatggtcaattgaatctctttctattgatgacccattactagatattgaagtcgtgcaattttcactgaggtgtgccgaagaagaccagtcttatgcagaagagacagataatattttccttcaagaagttttacctgtcaaggactcacaagaatacgaaacactaactctacaatggcttgacgttttgaatgggaaacttgcaattctgggcgaacgttttgaaaaagtggccgatgattggtataagaagtttggtaaaaatagaagctag

SEQ ID NO: 11501 - protein, 244 aa, Candida glabrata CBS 138
MSREEQPYIVATDGIVDALTKISSVFSAYLSANIHILNKYINYLRRVTSLKNERSIMIKIVKKLRFFNDTLLSTDLAQLQTTYEGEEPELALNIQTFASYLVKCLETIDLLNYFLLKPLQKELIAKTLNFDLVFPEDITDTVEDTYNHFVKFTQWSIESLSIDDPLLDIEVVQFSLRCAEEDQSYAEETDNIFLQEVLPVKDSQEYETLTLQWLDVLNGKLAILGERFEKVADDWYKKFGKNRS

SEQ ID NO: 11502 - DNA, 726 bp, Kluyveromyces lactis NRRL Y-1140
  CDS (1)..(726)
atggcttactgtcaagtggttatctcgaaagagattctggatgctgtgttacaattggtttccacatattcaaattatatatcaagatatgtggactatttgaacaaccttatcgcagtccagcgtcgtgtgagcacgctacgtttcgaaaggatgacattgatcaagtacgttaagaaactacggttcatggctgatgttttacacagctggtcgtttgaaggtgagaatgatcttattggaaaacggttaaacgaagtgatcgatccattgggagcatatttaatcaaagtgtttgaaatattagacctgttgaacttctacattacacagccgatgagaggcgaaacgatctctaagactttgaatgaggatttggtcgttagtgaggagaccattgtttgtatcaatgacagctacaggatatatatcaagggaattcaatggttagtagaatcgatcagtgaaaggaatggcaactgtcctcacctggcactagagttgattgaattcactagaaaatgtgccattgaagatgaggtggatttcactgctagcgaagatatcttactgcaagacgttgccattgtggaagtagaggaagaatacgttgacctgttgcatgattggtctgcgatcctggtgcagaaacaaacagaaatgaaggagttgttctcagaggactcaaagagatgggcttcaatgactaaaccggtcaagaagtag

SEQ ID NO: 11503 - protein, 241 aa, Kluyveromyces lactis NRRL Y-1140
MAYCQVVISKEILDAVLQLVSTYSNYISRYVDYLNNLIAVQRRVSTLRFERMTLIKYVKKLRFMADVLHSWSFEGENDLIGKRLNEVIDPLGAYLIKVFEILDLLNFYITQPMRGETISKTLNEDLVVSEETIVCINDSYRIYIKGIQWLVESISERNGNCPHLALELIEFTRKCAIEDEVDFTASEDILLQDVAIVEVEEEYVDLLHDWSAILVQKQTEMKELFSEDSKRWASMTKPVKK

SEQ ID NO: 11504 - DNA, 741 bp, Saccharomyces cerevisiae
  CDS (1)..(741)
atgagcaaagacaaagatatcaaagtcactcctggaacttgtgaattagttgaacaaatactcgccttactctcccggtatctctcatcttatattcacgtgctgaacaagttcatcagtcatttgcgaagggtagctacgctacgattcgagagaactactttgattaaatttgttaagaaattgagattttacaacgattgtgtgttaagctataatgcatcagagtttatcaatgaaggtaaaaacgaattagacccagaggcggattcgtttgacaaggtaattttaccaatagcttcaatgtttgttaaatgtgttgaaacgtttgacttactgaactattatctaacgcagtcattacaaaaggaaattttatctaaaactttgaacgaggacctaacgctaacagcagagtccatattagccattgacgatacctacaatcatttcgtgaaattttctcaatggatgattgagtctttgcgtataggcagcaacctgctagatttagaagttgttcaatttgccattaaatgcgcagatgaggacggaacgaatatcggagaaactgataatatcttcttgcaggaggttcttcctgtcaactccgaagaagaatttcagaccttgtcagctgcgtggcactccattttagatggtaagctgagcgccttggacgaagaatttgatgttgtcgctactaaatggcatgacaaatttggtaaattgaaaaactga

SEQ ID NO: 11505 - protein, 246 aa, Saccharomyces cerevisiae
MSKDKDIKVTPGTCELVEQILALLSRYLSSYIHVLNKFISHLRRVATLRFERTTLIKFVKKLRFYNDCVLSYNASEFINEGKNELDPEADSFDKVILPIASMFVKCVETFDLLNYYLTQSLQKEILSKTLNEDLTLTAESILAIDDTYNHFVKFSQWMIESLRIGSNLLDLEVVQFAIKCADEDGTNIGETDNIFLQEVLPVNSEEEFQTLSAAWHSILDGKLSALDEEFDVVATKWHDKFGKLKN

SEQ ID NO: 11506 - DNA, 26 bp, Artificial sequence
  primer
atgagcaaagacaaagatatcaaagt

SEQ ID NO: 11507 - DNA, 27 bp, Artificial sequence
  primer
tcagtttttcaatttaccaaatttgtc

SEQ ID NO: 11508 - protein, 242 aa, Artificial sequence
  consensus sequence
  Variant (2)..(23): Xaa in position 2 to 23 is any amino acid
  Variant (24)..(26): Xaa in position 24 to 26 is any or no amino acid
  Variant (28)..(28): Xaa in position 28 is any amino acid
  Variant (30)..(30): Xaa in position 30 is any amino acid
  Variant (32)..(36): Xaa in position 32 to 36 is any amino acid
  Variant (39)..(40): Xaa in position 39 to 40 is any amino acid
  Variant (42)..(44): Xaa in position 42 to 44 is any amino acid
  Variant (48)..(49): Xaa in position 48 to 49 is any amino acid
  Variant (51)..(52): Xaa in position 51 to 52 is any amino acid
  Variant (55)..(57): Xaa in position 55 to 57 is any amino acid
  Variant (60)..(60): Xaa in position 60 is any amino acid
  Variant (67)..(68): Xaa in position 67 to 68 is any amino acid
  Variant (70)..(78): Xaa in position 70 to 78 is any amino acid
  Variant (79)..(85): Xaa in position 79 to 85 is any or no amino acid
  Variant (87)..(93): Xaa in position 87 to 93 is any amino acid
  Variant (94)..(97): Xaa in position 94 to 97 is any or no amino acid
  Variant (99)..(106): Xaa in position 99 to 106 is any amino acid
  Variant (108)..(109): Xaa in position 108 to 109 is any amino acid
  Variant (111)..(112): Xaa in position 111 to 112 is any amino acid
  Variant (117)..(125): Xaa in position 117 to 125 is any amino acid
  Variant (127)..(129): Xaa in position 127 to 129 is any amino acid
  Variant (134)..(134): Xaa in position 134 is any amino acid
  Variant (137)..(147): Xaa in position 137 to 147 is any amino acid
  Variant (149)..(149): Xaa in position 149 is any amino acid
  Variant (151)..(154): Xaa in position 151 to 154 is any amino acid
  Variant (156)..(157): Xaa in position 156 to 157 is any amino acid
  Variant (160)..(161): Xaa in position 160 to 161 is any amino acid
  Variant (164)..(170): Xaa in position 164 to 170 is any amino acid
  Variant (171)..(173): Xaa in position 171 to 173 is any or no amino acid
  Variant (175)..(176): Xaa in position 175 to 176 is any amino acid
  Variant (178)..(180): Xaa in position 178 to 180 is any amino acid
  Variant (182)..(184): Xaa in position 182 to 184 is any amino acid
  Variant (187)..(187): Xaa in position 187 is any amino acid
  Variant (190)..(198): Xaa in position 190 to 198 is any amino acid
  Variant (200)..(200): Xaa in position 200 is any amino acid
  Variant (203)..(206): Xaa in position 203 to 206 is any amino acid
  Variant (208)..(211): Xaa in position 208 to 211 is any amino acid
  Variant (213)..(215): Xaa in position 213 to 215 is any amino acid
  Variant (217)..(219): Xaa in position 217 to 219 is any amino acid
  Variant (221)..(223): Xaa in position 221 to 223 is any amino acid
  Variant (225)..(226): Xaa in position 225 to 226 is any amino acid
  Variant (228)..(234): Xaa in position 228 to 234 is any amino acid
  Variant (236)..(241): Xaa in position 236 to 241 is any amino acid
MXXXXXXXXXXXXXXXXXXXXXXXXXSXYXSXXXXXLNXXIXXXRRVXXLXXERXXXIKXVKKLRFXXDXXXXXXXXXXXXXXXXEXXXXXXXXXXXIXXXXXXXXKXXEXXDLLNXXXXXXXXXEXXXKTLNXDLXXXXXXXXXXXDXYXXXXKXXQWXXESXXXXXXXXXXLXXEXXXFXXXCAXEDXXXXXXXXXIXLQXXXXVXXXXEXXXLXXXWXXXLXXKXXXXXXXFXXXXXXW

SEQ ID NO: 11509 - protein, 59 aa, Artificial sequence
  protein pattern
  Variant (2)..(4): Xaa in position 2 to 4 is any amino acid
  Variant (5)..(5): Xaa in position 5 is any or no amino acid
  Variant (7)..(7): Xaa in position 7 is any amino acid
  Variant (8)..(9): Xaa in position 8 to 9 is any or no amino acid
  Variant (11)..(11): Xaa in position 11 is any amino acid
  Variant (12)..(12): Xaa in position 12 is Phe, Ile or Leu
  Variant (17)..(18): Xaa in position 17 to 18 is Phe or Tyr
  Variant (19)..(19): Xaa in position 19 is Ile or Leu
  Variant (20)..(21): Xaa in position 20 to 21 is any amino acid
  Variant (22)..(22): Xaa in position 22 is Pro or Ser
  Variant (23)..(23): Xaa in position 23 is Leu or Met
  Variant (24)..(24): Xaa in position 24 is Gln or Arg
  Variant (25)..(25): Xaa in position 25 is any amino acid
  Variant (27)..(27): Xaa in position 27 is any amino acid
  Variant (28)..(28): Xaa in position 28 is Ile or Leu
  Variant (29)..(29): Xaa in position 29 is Ala or Ser
  Variant (34)..(34): Xaa in position 34 is any amino acid
  Variant (37)..(37): Xaa in position 37 is Thr or Val
  Variant (38)..(38): Xaa in position 38 is Phe, Leu or Val
  Variant (39)..(39): Xaa in position 39 is Pro, Ser or Thr
  Variant (40)..(40): Xaa in position 40 is Ala, Glu or Thr
  Variant (41)..(41): Xaa in position 41 is Asp or Glu
  Variant (42)..(44): Xaa in position 42 to 44 is any amino acid
  Variant (45)..(45): Xaa in position 45 is Ala, Cys or Thr
  Variant (46)..(46): Xaa in position 46 is Ile or Val
  Variant (47)..(47): Xaa in position 47 is Asp, Glu or Asn
  Variant (49)..(49): Xaa in position 49 is Ser or Thr
  Variant (51)..(51): Xaa in position 51 is Asn or Arg
  Variant (52)..(52): Xaa in position 52 is any amino acid
  Variant (53)..(53): Xaa in position 53 is Phe or Tyr
  Variant (54)..(54): Xaa in position 54 is Ile or Val
  Variant (56)..(57): Xaa in position 56 to 57 is any amino acid
AXXXXVXXXEXXDLLNXXXXXXXXXEXXXKTLNXDLXXXXXXXXXXXDXYXXXXKXXQW

SEQ ID NO: 11510 - protein, 43 aa, Artificial sequence
  protein pattern
  Variant (2)..(2): Xaa in position 2 is Ile or Leu
  Variant (4)..(5): Xaa in position 4 to 5 is any amino acid
  Variant (6)..(6): Xaa in position 6 is Ile or Val
  Variant (7)..(7): Xaa in position 7 is Asp or His
  Variant (8)..(8): Xaa in position 8 is any amino acid
  Variant (11)..(12): Xaa in position 11 to 12 is any amino acid
  Variant (14)..(14): Xaa in position 14 is Ala, Asn or Ser
  Variant (15)..(16): Xaa in position 15 to 16 is any amino acid
  Variant (20)..(20): Xaa in position 20 is any or no amino acid
  Variant (22)..(22): Xaa in position 22 is any or no amino acid
  Variant (24)..(24): Xaa in position 24 is Lys or Arg
  Variant (25)..(25): Xaa in position 25 is any amino acid
  Variant (28)..(29): Xaa in position 28 to 29 is any amino acid
  Variant (30)..(30): Xaa in position 30 is Leu or Met
  Variant (33)..(33): Xaa in position 33 is any amino acid
  Variant (40)..(40): Xaa in position 40 is any amino acid
  Variant (41)..(41): Xaa in position 41 is Ala or Asn
  Variant (43)..(43): Xaa in position 43 is Cys, Thr or Val
YXSXXXXXLNXXIXXXRRVXTXLXXERXXXIKXVKKLRFXXDX

SEQ ID NO: 11511 - protein, 54 aa, Artificial sequence
  protein pattern
  Variant (2)..(5): Xaa in position 2 to 5 is any amino acid
  Variant (6)..(6): Xaa in position 6 is any or no amino acid
  Variant (8)..(8): Xaa in position 8 is any or no amino acid
  Variant (10)..(10): Xaa in position 10 is any or no amino acid
  Variant (12)..(12): Xaa in position 12 is Phe or Leu
  Variant (15)..(15): Xaa in position 15 is Asp or Glu
  Variant (16)..(16): Xaa in position 16 is Ile or Val
  Variant (17)..(17): Xaa in position 17 is Ala, Leu or Val
  Variant (18)..(18): Xaa in position 18 is Ile or Pro
  Variant (20)..(20): Xaa in position 20 is any amino acid
  Variant (21)..(21): Xaa in position 21 is Asp, Ser or Val
  Variant (22)..(22): Xaa in position 22 is Glu or Ser
  Variant (23)..(23): Xaa in position 23 is Glu or Gln
  Variant (25)..(25): Xaa in position 25 is Phe or Tyr
  Variant (26)..(26): Xaa in position 26 is any amino acid
  Variant (27)..(27): Xaa in position 27 is Asp, Ser or Thr
  Variant (29)..(30): Xaa in position 29 to 30 is any amino acid
  Variant (31)..(31): Xaa in position 31 is Ala, Asp or Gln
  Variant (33)..(33): Xaa in position 33 is any amino acid
  Variant (34)..(34): Xaa in position 34 is Ala, Asp or Ser
  Variant (35)..(35): Xaa in position 35 is Ile or Val
  Variant (37)..(37): Xaa in position 37 is Asp, Asn or Val
  Variant (38)..(38): Xaa in position 38 is Gly or Gln
  Variant (40)..(40): Xaa in position 40 is any amino acid
  Variant (41)..(41): Xaa in position 41 is Ala, Asn, Ser or Thr
  Variant (42)..(42): Xaa in position 42 is any amino acid
  Variant (43)..(43): Xaa in position 43 is Leu or Met
  Variant (44)..(44): Xaa in position 44 is any amino acid
  Variant (45)..(45): Xaa in position 45 is Glu or Gln
  Variant (46)..(46): Xaa in position 46 is any amino acid
  Variant (48)..(48): Xaa in position 48 is Asp, Glu or Ser
  Variant (49)..(49): Xaa in position 49 is any amino acid
  Variant (50)..(50): Xaa in position 50 is Asp or Val
  Variant (51)..(51): Xaa in position 51 is Ala or Ser
  Variant (52)..(52): Xaa in position 52 is any amino acid
  Variant (53)..(53): Xaa in position 53 is Asp, Lys or Arg
DXXXXXEXDXIXLQXXXXVXXXXEXXXLXXXWXXXLXXKXXXXXXXFXXXXXXW

SEQ ID NO: 11512 - protein, 18 aa, Artificial sequence
  protein pattern
  Variant (2)..(3): Xaa in position 2 to 3 is Glu or Ser
  Variant (4)..(4): Xaa in position 4 is any amino acid
  Variant (5)..(5): Xaa in position 5 is Asn, Arg or Ser
  Variant (6)..(6): Xaa in position 6 is Gly or Ile
  Variant (7)..(7): Xaa in position 7 is Asp, Gly or Asn
  Variant (8)..(8): Xaa in position 8 is Cys, Asp or Ser
  Variant (9)..(9): Xaa in position 9 is Asn or Pro
  Variant (10)..(10): Xaa in position 10 is any amino acid
  Variant (12)..(12): Xaa in position 12 is Ala or Asp
  Variant (13)..(13): Xaa in position 13 is Ile or Leu
  Variant (15)..(15): Xaa in position 15 is Leu or Val
  Variant (16)..(16): Xaa in position 16 is Ile or Val
  Variant (17)..(17): Xaa in position 17 is Glu or Gln
IXXXXXXXXXLXXEXXXF

SEQ ID NO: 11513 - DNA, 2670 bp, Saccharomyces cerevisiae
  CDS (1)..(2670)
atgatgcctgatgacaattcaaactcgtccactcaaaactcaagcgcattatgcaaggacctgaggaaagaatatgaatctcttttcactttaaaggaagattctgggttagagatttcaccaatattcaatgtccttccacctaaaaaggattatcctgactactacgcagtgatcaagaaccctgtatctttcaatactttaaaaaagcgtattccacattatacagatgctcaacagtttatgaacgatgttgtccagattccatggaatgccaagacttacaatacaagagattcaggaatttataaatacgccttagtccttgagaaatatttaaaggacacaatctatccaaatttaaaagaaaaatatcctcaattagtgtatcctgatttgggtcctctacccgatgaatcaggttatgaagagtttcaacagaaattaagagaaaaagctgaggaagtagcgagagctaatgcagccagagccgagtcgagctcttcaatgaattcaacagaagcagccagaagattaagaaagactcgtacttccgtcaaaagagaatcagaaccaggaaccgatacaaataatgatgaggactatgaggcgacggatatggatatcgataaccctaaggatgctgattttcctgatttgataagaaagccactaataaatattaatccatatactcggaaaccattaagagacaacaggtccactactccatctcactcaggcacccctcagccgttaggcccaaggcatagacaggtatccagaactcaggtaaagcgtgggagacccccaatcatcgacttaccgtatattcaaagaatgaaaaatgttatgaaagtactaaaaaaagaggtgctagatagtggaattggtctaactgatctttttgaaagattgcccgatagacacagagatgcaaattactacatcatgattgctaatccaattagtcttcaagacataaataaaaaggtaaagactcgtcgttataaaacgttccaggagttccagaatgattttaatcttatgttaaccaactttagaatttcgcacagaggtgatcctgaaagcataaaaatttcaaatatcttagaaaagacctttactagtctggcaagattcgaactatccaaacctgatagaagtttcattccagaaggcgagctaagataccctctagatgaagtcattgtaaataatatatcataccacgtgggagattgggcacttcttcgaaatcaaaatgatcctcaaaaacctatagtgggccaaatattcaggctatggaagacaccagatgggaaacaatggttaaacgcttgttggtattacagacccgaacaaactgtgcatagagtggatagattgttttacaaaaacgaagttatgaaaacaggtcagtaccgtgatcatttagtgtcaaacttagttgggaaatgctatgtgattcactttactagatatcaacgtggtaatcccgatatgaaattggagggtcccttgttcgtttgcgaattccgttataatgaatccgataaaatttttaacaagattagaacctggaaggcttgcttaccagaggaaattcgtgatttggacgaagctaccattccggtaaatggtagaaagttcttcaaatatccttcccccataagacatctactaccagctaatgcaacgccgcatgatcgcgttcctgaaccaacgatgggatccccggacgcgccaccattggtcggtgccgtttatatgagacctaaaatgcagcgtgacgatttgggggaatatgcaacctctgatgactgtcccaggtatattatcagacccaacgattctcccgaagagggacaagtggatatagaaacaggtacgatcaccacaaacacgccaacagcaaatgctcttcctaaaacaggatactcaagtagtaaactatccagtttaagatataacaggtcatctatgtctttagaaaaccaaaatgctattggccagcaacaaataccactgtcaagagttggttcccctggcgcgggaggcccgcttactgtacaaggtttaaagcaacaccaattgcaaaggttacaacagcagcaacatcaataccaacaacagaaaagatcccaagcatcacgttataatatcccaacaataatcgatgatttaacatcgcaggcatcaagaggtaatttgggtaatataatgatcgatgcagcctcctcgtttgtcttacctatctctataaccaaaaacgtagatgttttgcagcgtactgatctgcacagccaaaccaagagatctggaagagaagagatgtttccatggaaaaaaacaaagggtgaaatattatggttcagaggacctagtgtgatagtaaatgaacgaataataaattcaggtgacccacacctaagcctgccactgaataggtggtttaccactaacaagaaaagaaaactagaatacgaagaagttgaagaaaccatggaagatgtgactggaaaggacaaagatgatgatggcttagaaccggatgttgaaaatgagaaagagtccttgccaggcccatttgtccttggattaagaccctcggctaagttcacggcgcacagactctctatgctgcggcctccttcgtcgtcttcatga

SEQ ID NO: 11514 - protein, 889 aa, Saccharomyces cerevisiae
MMPDDNSNSSTQNSSALCKDLRKEYESLFTLKEDSGLEISPIFNVLPPKKDYPDYYAVIKNPVSFNTLKKRIPHYTDAQQFMNDVVQIPWNAKTYNTRDSGIYKYALVLEKYLKDTIYPNLKEKYPQLVYPDLGPLPDESGYEEFQQKLREKAEEVARANAARAESSSSMNSTEAARRLRKTRTSVKRESEPGTDTNNDEDYEATDMDIDNPKDADFPDLIRKPLININPYTRKPLRDNRSTTPSHSGTPQPLGPRHRQVSRTQVKRGRPPIIDLPYIQRMKNVMKVLKKEVLDSGIGLTDLFERLPDRHRDANYYIMIANPISLQDINKKVKTRRYKTFQEFQNDFNLMLTNFRISHRGDPESIKISNILEKTFTSLARFELSKPDRSFIPEGELRYPLDEVIVNNISYHVGDWALLRNQNDPQKPIVGQIFRLWKTPDGKQWLNACWYYRPEQTVHRVDRLFYKNEVMKTGQYRDHLVSNLVGKCYVIHFTRYQRGNPDMKLEGPLFVCEFRYNESDKIFNKIRTWKACLPEEIRDLDEATIPVNGRKFFKYPSPIRHLLPANATPHDRVPEPTMGSPDAPPLVGAVYMRPKMQRDDLGEYATSDDCPRYIIRPNDSPEEGQVDIETGTITTNTPTANALPKTGYSSSKLSSLRYNRSSMSLENQNAIGQQQIPLSRVGSPGAGGPLTVQGLKQHQLQRLQQQQHQYQQQKRSQASRYNIPTIIDDLTSQASRGNLGNIMIDAASSFVLPISITKNVDVLQRTDLHSQTKRSGREEMFPWKKTKGEILWFRGPSVIVNERIINSGDPHLSLPLNRWFTTNKKRKLEYEEVEETMEDVTGKDKDDDGLEPDVENEKESLPGPFVLGLRPSAKFTAHRLSMLRPPSSSS

SEQ ID NO: 11515 - DNA, 2550 bp, Eremothecium gossypii; identical to SEQ ID NO: 2471
  CDS (1)..(2550)

SEQ ID NO: 11516 - protein, 849 aa, Eremothecium gossypii; identical to SEQ ID NO: 2472

SEQ ID NO: 11517 - DNA, 2685 bp, Unknown; identical to SEQ ID NO: 2473
  Unidentified
  CDS (1)..(2685)

SEQ ID NO: 11518 - protein, 894 aa, Unknown; identical to SEQ ID NO: 2474
  Unidentified

SEQ ID NO: 11519 - DNA, 2805 bp, Candida glabrata CBS 138; identical to SEQ ID NO: 2475
  CDS (1)..(2805)

SEQ ID NO: 11520 - protein, 934 aa, Candida glabrata CBS 138; identical to SEQ ID NO: 2476

SEQ ID NO: 11521 - DNA, 2748 bp, Kluyveromyces lactis NRRL Y-1140; identical to SEQ ID NO: 2477
  CDS (1)..(2748)

SEQ ID NO: 11522 - protein, 915 aa, Kluyveromyces lactis NRRL Y-1140; identical to SEQ ID NO: 2478

SEQ ID NO: 11523 - DNA, 2406 bp, Debaryomyces hansenii CBS767; identical to SEQ ID NO: 2479
  CDS (1)..(2406)

SEQ ID NO: 11524 - protein, 801 aa, Debaryomyces hansenii CBS767; identical to SEQ ID NO: 2480

SEQ ID NO: 11525 - DNA, 2787 bp, Saccharomyces cerevisiae; identical to SEQ ID NO: 2481
  CDS (1)..(2787)

SEQ ID NO: 11526 - protein, 928 aa, Saccharomyces cerevisiae; identical to SEQ ID NO: 2482

SEQ ID NO: 11527 - DNA, 25 bp, Artificial sequence
  primer
atgatgcctgatgacaattcaaact

SEQ ID NO: 11528 - DNA, 22 bp, Artificial sequence
  primer
tcatgaagacgacgaaggaggc

SEQ ID NO: 11529 - protein, 998 aa, Artificial sequence; identical to SEQ ID NO: 2485
  consensus sequence
  Variant (2)..(4): Xaa in position 2 to 4 is any amino acid
  Variant (6)..(14): Xaa in position 6 to 14 is any amino acid
  Variant (17)..(19): Xaa in position 17 to 19 is any amino acid
  Variant (21)..(22): Xaa in position 21 to 22 is any amino acid
  Variant (24)..(24): Xaa in position 24 is any amino acid
  Variant (26)..(26): Xaa in position 26 is any amino acid
  Variant (28)..(29): Xaa in position 28 to 29 is any amino acid
  Variant (32)..(35): Xaa in position 32 to 35 is any amino acid
  Variant (41)..(42): Xaa in position 41 to 42 is any amino acid
  Variant (44)..(45): Xaa in position 44 to 45 is any amino acid
  Variant (47)..(47): Xaa in position 47 is any amino acid
  Variant (49)..(50): Xaa in position 49 to 50 is any amino acid
  Variant (52)..(53): Xaa in position 52 to 53 is any amino acid
  Variant (55)..(58): Xaa in position 55 to 58 is any amino acid
  Variant (60)..(62): Xaa in position 60 to 62 is any amino acid
  Variant (63)..(64): Xaa in position 63 to 64 is any or no amino acid
  Variant (66)..(66): Xaa in position 66 is any amino acid
  Variant (68)..(69): Xaa in position 68 to 69 is any amino acid
  Variant (71)..(73): Xaa in position 71 to 73 is any amino acid
  Variant (75)..(75): Xaa in position 75 is any amino acid
  Variant (79)..(80): Xaa in position 79 to 80 is any amino acid
  Variant (83)..(85): Xaa in position 83 to 85 is any amino acid
  Variant (87)..(87): Xaa in position 87 is any amino acid
  Variant (90)..(90): Xaa in position 90 is any amino acid
  Variant (93)..(94): Xaa in position 93 to 94 is any amino acid
  Variant (96)..(104): Xaa in position 96 to 104 is any amino acid
  Variant (106)..(115): Xaa in position 106 to 115 is any amino acid
  Variant (116)..(120): Xaa in position 116 to 120 is any or no amino acid
  Variant (123)..(123): Xaa in position 123 is any amino acid
  Variant (127)..(127): Xaa in position 127 is any amino acid
  Variant (129)..(204): Xaa in position 129 to 204 is any amino acid
  Variant (205)..(265): Xaa in position 205 to 265 is any or no amino acid
  Variant (267)..(282): Xaa in position 267 to 282 is any amino acid
  Variant (283)..(289): Xaa in position 283 to 289 is any or no amino acid
  Variant (295)..(295): Xaa in position 295 is any amino acid
  Variant (301)..(302): Xaa in position 301 to 302 is any amino acid
  Variant (304)..(304): Xaa in position 304 is any amino acid
  Variant (307)..(308): Xaa in position 307 to 308 is any amino acid
  Variant (310)..(313): Xaa in position 310 to 313 is any amino acid
  Variant (315)..(321): Xaa in position 315 to 321 is any amino acid
  Variant (322)..(323): Xaa in position 322 to 323 is any or no amino acid
  Variant (325)..(327): Xaa in position 325 to 327 is any amino acid
  Variant (329)..(330): Xaa in position 329 to 330 is any amino acid
  Variant (334)..(339): Xaa in position 334 to 339 is any amino acid
  Variant (342)..(343): Xaa in position 342 to 343 is any amino acid
  Variant (345)..(346): Xaa in position 345 to 346 is any amino acid
  Variant (348)..(349): Xaa in position 348 to 349 is any amino acid
  Variant (351)..(352): Xaa in position 351 to 352 is any amino acid
  Variant (354)..(356): Xaa in position 354 to 356 is any amino acid
  Variant (359)..(359): Xaa in position 359 is any amino acid
  Variant (363)..(364): Xaa in position 363 to 364 is any amino acid
  Variant (366)..(367): Xaa in position 366 to 367 is any amino acid
  Variant (369)..(370): Xaa in position 369 to 370 is any amino acid
  Variant (372)..(373): Xaa in position 372 to 373 is any amino acid
  Variant (376)..(377): Xaa in position 376 to 377 is any amino acid
  Variant (379)..(381): Xaa in position 379 to 381 is any amino acid
  Variant (383)..(396): Xaa in position 383 to 396 is any amino acid
  Variant (397)..(398): Xaa in position 397 to 398 is any or no amino acid
  Variant (400)..(401): Xaa in position 400 to 401 is any amino acid
  Variant (403)..(408): Xaa in position 403 to 408 is any amino acid
  Variant (412)..(412): Xaa in position 412 is any amino acid
  Variant (415)..(415): Xaa in position 415 is any amino acid
  Variant (417)..(420): Xaa in position 417 to 420 is any amino acid
  Variant (421)..(426): Xaa in position 421 to 426 is any or no amino acid
  Variant (429)..(431): Xaa in position 429 to 431 is any amino acid
  Variant (434)..(442): Xaa in position 434 to 442 is any amino acid
  Variant (444)..(445): Xaa in position 444 to 445 is any amino acid
  Variant (449)..(449): Xaa in position 449 is any amino acid
  Variant (452)..(452): Xaa in position 452 is any amino acid
  Variant (454)..(454): Xaa in position 454 is any amino acid
  Variant (457)..(458): Xaa in position 457 to 458 is any amino acid
  Variant (461)..(461): Xaa in position 461 is any amino acid
  Variant (463)..(463): Xaa in position 463 is any amino acid
  Variant (467)..(467): Xaa in position 467 is any amino acid
  Variant (470)..(470): Xaa in position 470 is any amino acid
  Variant (472)..(472): Xaa in position 472 is any amino acid
  Variant (473)..(473): Xaa in position 473 is any or no amino acid
  Variant (476)..(477): Xaa in position 476 to 477 is any amino acid
  Variant (481)..(481): Xaa in position 481 is any amino acid
  Variant (485)..(485): Xaa in position 485 is any amino acid
  Variant (504)..(504): Xaa in position 504 is any amino acid
  Variant (506)..(506): Xaa in position 506 is any amino acid
  Variant (513)..(518): Xaa in position 513 to 518 is any amino acid
  Variant (524)..(524): Xaa in position 524 is any amino acid
  Variant (529)..(529): Xaa in position 529 is any amino acid
  Variant (533)..(533): Xaa in position 533 is any amino acid
  Variant (535)..(539): Xaa in position 535 to 539 is any amino acid
  Variant (540)..(542): Xaa in position 540 to 542 is any or no amino acid
  Variant (545)..(545): Xaa in position 545 is any amino acid
  Variant (547)..(547): Xaa in position 547 is any amino acid
  Variant (550)..(550): Xaa in position 550 is any amino acid
  Variant (555)..(556): Xaa in position 555 to 556 is any amino acid
  Variant (558)..(558): Xaa in position 558 is any amino acid
  Variant (567)..(567): Xaa in position 567 is any amino acid
  Variant (573)..(573): Xaa in position 573 is any amino acid
  Variant (576)..(579): Xaa in position 576 to 579 is any amino acid
  Variant (580)..(580): Xaa in position 580 is any or no amino acid
  Variant (585)..(585): Xaa in position 585 is any amino acid
  Variant (587)..(587): Xaa in position 587 is any amino acid
  Variant (591)..(591): Xaa in position 591 is any amino acid
  Variant (593)..(594): Xaa in position 593 to 594 is any amino acid
  Variant (598)..(599): Xaa in position 598 to 599 is any amino acid
  Variant (603)..(605): Xaa in position 603 to 605 is any amino acid
  Variant (607)..(608): Xaa in position 607 to 608 is any amino acid
  Variant (610)..(611): Xaa in position 610 to 611 is any amino acid
  Variant (613)..(613): Xaa in position 613 is any amino acid
  Variant (616)..(616): Xaa in position 616 is any amino acid
  Variant (618)..(620): Xaa in position 618 to 620 is any amino acid
  Variant (621)..(621): Xaa in position 621 is any or no amino acid
  Variant (625)..(625): Xaa in position 625 is any amino acid
  Variant (628)..(628): Xaa in position 628 is any amino acid
  Variant (631)..(631): Xaa in position 631 is any amino acid
  Variant (633)..(633): Xaa in position 633 is any amino acid
  Variant (635)..(637): Xaa in position 635 to 637 is any amino acid
  Variant (651)..(652): Xaa in position 651 to 652 is any amino acid
  Variant (657)..(657): Xaa in position 657 is any amino acid
  Variant (659)..(662): Xaa in position 659 to 662 is any amino acid
  Variant (663)..(664): Xaa in position 663 to 664 is any or no amino acid
  Variant (666)..(667): Xaa in position 666 to 667 is any amino acid
  Variant (669)..(671): Xaa in position 669 to 671 is any amino acid
  Variant (674)..(683): Xaa in position 674 to 683 is any amino acid
  Variant (684)..(684): Xaa in position 684 is any or no amino acid
  Variant (686)..(688): Xaa in position 686 to 688 is any amino acid
  Variant (689)..(694): Xaa in position 689 to 694 is any or no amino acid
  Variant (696)..(789): Xaa in position 696 to 789 is any amino acid
  Variant (790)..(818): Xaa in position 790 to 818 is any or no amino acid
  Variant (820)..(850): Xaa in position 820 to 850 is any amino acid
  Variant (851)..(859): Xaa in position 851 to 859 is any or no amino acid
  Variant (861)..(862): Xaa in position 861 to 862 is any amino acid
  Variant (865)..(865): Xaa in position 865 is any amino acid
  Variant (868)..(868): Xaa in position 868 is any amino acid
  Variant (870)..(872): Xaa in position 870 to 872 is any amino acid
  Variant (875)..(879): Xaa in position 875 to 879 is any amino acid
  Variant (880)..(887): Xaa in position 880 to 887 is any or no amino acid
  Variant (889)..(891): Xaa in position 889 to 891 is any amino acid
  Variant (892)..(993): Xaa in position 892 to 993 is any or no amino acid
  Variant (995)..(996): Xaa in position 995 to 996 is any amino acid

SEQ ID NO: 11530 - protein, 60 aa, Artificial sequence; identical to SEQ ID NO: 2486
  protein pattern
  Variant (2)..(3): Xaa in position 2 to 3 is any amino acid
  Variant (7)..(7): Xaa in position 7 is any or no amino acid
  Variant (9)..(9): Xaa in position 9 is any or no amino acid
  Variant (12)..(12): Xaa in position 12 is any amino acid
  Variant (28)..(28): Xaa in position 28 is Asn or Thr
  Variant (31)..(31): Xaa in position 31 is Met or Val
  Variant (33)..(33): Xaa in position 33 is Ser or Thr
  Variant (40)..(40): Xaa in position 40 is any amino acid
  Variant (41)..(41): Xaa in position 41 is Ile or Val
  Variant (42)..(42): Xaa in position 42 is Glu, Asn, Gln or Ser
  Variant (43)..(43): Xaa in position 43 is Asp, Glu or Asn
  Variant (44)..(44): Xaa in position 44 is Ile or Leu
  Variant (45)..(45): Xaa in position 45 is any amino acid
  Variant (51)..(51): Xaa in position 51 is any amino acid
  Variant (56)..(56): Xaa in position 56 is Phe or Tyr
  Variant (60)..(60): Xaa in position 60 is Asp or Asn

SEQ ID NO: 11531 - protein, 33 aa, Artificial sequence; identical to SEQ ID NO: 2487
  protein pattern
  Variant (3)..(3): Xaa in position 3 is any amino acid
  Variant (5)..(5): Xaa in position 5 is Ile or Val
  Variant (8)..(8): Xaa in position 8 is Phe or Tyr
  Variant (13)..(13): Xaa in position 13 is Ser or Thr
  Variant (14)..(14): Xaa in position 14 is Asp or Glu
  Variant (16)..(16): Xaa in position 16 is Ala, Ile or Val
  Variant (24)..(24): Xaa in position 24 is Lys or Arg
  Variant (25)..(25): Xaa in position 25 is Ala or Gly
  Variant (31)..(31): Xaa in position 31 is Ile, Leu or Val
  Variant (33)..(33): Xaa in position 33 is Asp or Glu

SEQ ID NO: 11532 - protein, 29 aa, Artificial sequence
  protein pattern
  Variant (2)..(2): Xaa in position 2 is any amino acid
  Variant (3)..(3): Xaa in position 3 is Ile or Val
  Variant (7)..(7): Xaa in position 7 is Ala, Ile or Val
  Variant (9)..(9): Xaa in position 9 is Ile or Leu
  Variant (10)..(10): Xaa in position 10 is any amino acid
  Variant (12)..(12): Xaa in position 12 is any amino acid
  Variant (13)..(13): Xaa in position 13 is Asn or Ser
  Variant (15)..(15): Xaa in position 15 is any amino acid
  Variant (16)..(16): Xaa in position 16 is Asn, Gln or Thr
  Variant (19)..(19): Xaa in position 19 is any amino acid
  Variant (21)..(21): Xaa in position 21 is Ala or Gly
  Variant (25)..(25): Xaa in position 25 is Lys or Arg
  Variant (28)..(28): Xaa in position 28 is any amino acid
YXXGDWXLXXNXXDXXKPXVXQIFXLWXT

SEQ ID NO: 11533 - protein, 30 aa, Artificial sequence; identical to SEQ ID NO: 2489
  protein pattern
  Variant (2)..(4): Xaa in position 2 to 4 is any or no amino acid
  Variant (6)..(6): Xaa in position 6 is Ile or Leu
  Variant (9)..(9): Xaa in position 9 is Ala, Gly or Leu
  Variant (12)..(12): Xaa in position 12 is Leu or Met
  Variant (14)..(14): Xaa in position 14 is Glu, Pro or Ser
  Variant (15)..(15): Xaa in position 15 is any amino acid
  Variant (16)..(16): Xaa in position 16 is Ile, Leu, Met or Val
  Variant (17)..(17): Xaa in position 17 is any amino acid
  Variant (18)..(18): Xaa in position 18 is Asp, Lys or Arg
  Variant (20)..(20): Xaa in position 20 is Asp or Glu
  Variant (23)..(23): Xaa in position 23 is Glu or Gln
  Variant (25)..(25): Xaa in position 25 is Ala or Ser
  Variant (28)..(28): Xaa in position 28 is Asp or Pro
  Variant (29)..(29): Xaa in position 29 is Asp or Asn
  Variant (30)..(30): Xaa in position 30 is Cys or Val

SEQ ID NO: 11534 - protein, 32 aa, Artificial sequence; identical to SEQ ID NO: 2490
  protein pattern
  Variant (2)..(4): Xaa in position 2 to 4 is any amino acid
  Variant (6)..(6): Xaa in position 6 is Asp, Glu or Gln
  Variant (8)..(8): Xaa in position 8 is Met or Val
  Variant (9)..(9): Xaa in position 9 is Asp, Asn or Thr
  Variant (10)..(10): Xaa in position 10 is Asp or Gln
  Variant (11)..(11): Xaa in position 11 is Phe, Leu or Val
  Variant (12)..(12): Xaa in position 12 is Ala or Val
  Variant (13)..(13): Xaa in position 13 is any amino acid
  Variant (14)..(14): Xaa in position 14 is Ile or Val
  Variant (15)..(15): Xaa in position 15 is Pro or Thr
  Variant (19)..(20): Xaa in position 19 to 20 is any amino acid
  Variant (23)..(23): Xaa in position 23 is Ala, Thr or Val
  Variant (24)..(24): Xaa in position 24 is Lys or Arg
  Variant (25)..(25): Xaa in position 25 is Asp, Glu or Thr
  Variant (27)..(27): Xaa in position 27 is any amino acid
  Variant (28)..(28): Xaa in position 28 is Ile or Val
  Variant (30)..(30): Xaa in position 30 is Asp, His or Lys
  Variant (31)..(31): Xaa in position 31 is His or Tyr

SEQ ID NO: 11535 - protein, 59 aa, Artificial sequence; identical to SEQ ID NO: 2491
  protein pattern
  Variant (2)..(4): Xaa in position 2 to 4 is any amino acid
  Variant (6)..(6): Xaa in position 6 is Asp or Glu
  Variant (7)..(7): Xaa in position 7 is Lys or Arg
  Variant (8)..(8): Xaa in position 8 is Ile or Leu
  Variant (11)..(12): Xaa in position 11 to 12 is any or no amino acid
  Variant (14)..(16): Xaa in position 14 to 16 is any amino acid
  Variant (17)..(18): Xaa in position 17 to 18 is any or no amino acid
  Variant (20)..(21): Xaa in position 20 to 21 is any amino acid
  Variant (22)..(22): Xaa in position 22 is Ile, Met or Val
  Variant (24)..(24): Xaa in position 24 is Ala, Ser or Thr
  Variant (25)..(25): Xaa in position 25 is Asp or Asn
  Variant (27)..(27): Xaa in position 27 is Ile, Leu or Val
  Variant (28)..(28): Xaa in position 28 is Cys or Ser
  Variant (30)..(30): Xaa in position 30 is any amino acid
  Variant (31)..(31): Xaa in position 31 is Asp or Glu
  Variant (33)..(33): Xaa in position 33 is any amino acid
  Variant (34)..(35): Xaa in position 34 to 35 is Lys or Arg
  Variant (38)..(38): Xaa in position 38 is Gln, Ser or Thr
  Variant (40)..(40): Xaa in position 40 is Lys or Arg
  Variant (42)..(42): Xaa in position 42 is Lys or Arg
  Variant (43)..(43): Xaa in position 43 is Asp, Asn or Thr
  Variant (45)..(46): Xaa in position 45 to 46 is any amino acid
  Variant (48)..(48): Xaa in position 48 is any amino acid
  Variant (49)..(49): Xaa in position 49 is Asp, Glu, Asn or Gln
  Variant (51)..(51): Xaa in position 51 is Phe, Ile or Val
  Variant (52)..(52): Xaa in position 52 is any amino acid
  Variant (55)..(55): Xaa in position 55 is Ile or Leu
  Variant (56)..(56): Xaa in position 56 is Glu, Asn, Ser or Thr
  Variant (58)..(58): Xaa in position 58 is Phe or Tyr
  Variant (59)..(59): Xaa in position 59 is Lys or Arg

SEQ ID NO: 11536 - protein, 27 aa, Artificial sequence
  protein pattern
  Variant (2)..(2): Xaa in position 2 is any or no amino acid
  Variant (7)..(7): Xaa in position 7 is Ile or Val
  Variant (13)..(14): Xaa in position 13 to 14 is any amino acid
  Variant (16)..(16): Xaa in position 16 is Ile or Met
  Variant (19)..(19): Xaa in position 19 is Ile or Val
  Variant (20)..(20): Xaa in position 20 is Leu or Met
  Variant (22)..(22): Xaa in position 22 is any amino acid
  Variant (23)..(23): Xaa in position 23 is Ile, Leu or Met
  Variant (24)..(25): Xaa in position 24 to 25 is Lys or Arg
  Variant (27)..(27): Xaa in position 27 is Thr or Val
RXGRPPXIDLPYXXRXKNXXKXXXXEX

SEQ ID NO: 11537 - protein, 30 aa, Artificial sequence; identical to SEQ ID NO: 2493
  protein pattern
  Variant (5)..(5): Xaa in position 5 is Phe or Tyr
  Variant (7)..(7): Xaa in position 7 is Phe or Tyr
  Variant (8)..(8): Xaa in position 8 is Glu or Pro
  Variant (12)..(12): Xaa in position 12 is any amino acid
  Variant (13)..(13): Xaa in position 13 is Asp or His
  Variant (16)..(16): Xaa in position 16 is any or no amino acid
  Variant (18)..(19): Xaa in position 18 to 19 is any amino acid
  Variant (20)..(20): Xaa in position 20 is any or no amino acid
  Variant (22)..(23): Xaa in position 22 to 23 is any amino acid
  Variant (25)..(25): Xaa in position 25 is any amino acid
  Variant (26)..(26): Xaa in position 26 is Ile, Leu or Val
  Variant (28)..(28): Xaa in position 28 is Asp, Glu or Gln

SEQ ID NO: 11538 - protein, 19 aa, Artificial sequence
  protein pattern
  Variant (6)..(6): Xaa in position 6 is any amino acid
  Variant (7)..(7): Xaa in position 7 is Ile or Val
  Variant (9)..(9): Xaa in position 9 is Glu, Lys or Arg
  Variant (10)..(10): Xaa in position 10 is any amino acid
  Variant (12)..(12): Xaa in position 12 is Ile, Leu or Val
  Variant (14)..(14): Xaa in position 14 is Phe, Ile or Leu
  Variant (15)..(15): Xaa in position 15 is Ala, Asn or Ser
  Variant (17)..(17): Xaa in position 17 is any amino acid
  Variant (18)..(18): Xaa in position 18 is any or no amino acid
YPDYYXXIXXPXSXXTXXK

SEQ ID NO: 11539 - protein, 17 aa, Artificial sequence
  protein pattern
  Variant (2)..(2): Xaa in position 2 is Phe or Tyr
  Variant (3)..(3): Xaa in position 3 is any amino acid
  Variant (4)..(4): Xaa in position 4 is Ala or Gly
  Variant (5)..(5): Xaa in position 5 is Ala or Pro
  Variant (6)..(6): Xaa in position 6 is Gly, Pro or Ser
  Variant (8)..(10): Xaa in position 8 to 10 is any amino acid
  Variant (11)..(11): Xaa in position 11 is Glu or Asn
  Variant (13)..(13): Xaa in position 13 is Ile, Leu or Val
  Variant (14)..(14): Xaa in position 14 is Ile, Leu or Met
  Variant (15)..(15): Xaa in position 15 is Asp, Asn or Ser
  Variant (16)..(16): Xaa in position 16 is Asn, Ser or Thr
  Variant (17)..(17): Xaa in position 17 is Asp or Gly
WXXXXXVXXXXRXXXXX

SEQ ID NO: 11540 - protein, 20 aa, Artificial sequence
  protein pattern
  Variant (2)..(3): Xaa in position 2 to 3 is any amino acid
  Variant (5)..(7): Xaa in position 5 to 7 is any amino acid
  Variant (8)..(8): Xaa in position 8 is Ala, Cys or Val
  Variant (9)..(10): Xaa in position 9 to 10 is any amino acid
  Variant (14)..(14): Xaa in position 14 is Lys or Arg
  Variant (17)..(17): Xaa in position 17 is any amino acid
  Variant (18)..(18): Xaa in position 18 is Asp or Ser
  Variant (19)..(19): Xaa in position 19 is Phe or Tyr
  Variant (20)..(20): Xaa in position 20 is Ile, Leu or Met
EXXFXXXXXXELSXPDXXXX

SEQ ID NO: 11541 - protein, 18 aa, Artificial sequence
  protein pattern
  Variant (3)..(3): Xaa in position 3 is Asp or Glu
  Variant (4)..(4): Xaa in position 4 is Asp, Glu or Ser
  Variant (5)..(5): Xaa in position 5 is Asn, Gln or Ser
  Variant (7)..(7): Xaa in position 7 is any amino acid
  Variant (8)..(8): Xaa in position 8 is Glu or Asn
  Variant (10)..(10): Xaa in position 10 is any amino acid
  Variant (11)..(11): Xaa in position 11 is Glu or Pro
  Variant (12)..(12): Xaa in position 12 is any amino acid
  Variant (14)..(15): Xaa in position 14 to 15 is any amino acid
  Variant (18)..(18): Xaa in position 18 is Ile, Leu or Pro
LKXXXGXXIXXXFXXLPX

SEQ ID NO: 11542 - protein, 20 aa, Artificial sequence
  protein pattern
  Variant (2)..(2): Xaa in position 2 is Lys or Arg
  Variant (3)..(3): Xaa in position 3 is His or Tyr
  Variant (8)..(8): Xaa in position 8 is Gly or Asn
  Variant (10)..(10): Xaa in position 10 is any or no amino acid
  Variant (12)..(13): Xaa in position 12 to 13 is any amino acid
  Variant (14)..(16): Xaa in position 14 to 16 is any or no amino acid
  Variant (18)..(19): Xaa in position 18 to 19 is any amino acid
PXXIIRPXDXPXXXXXGXXD

SEQ ID NO: 11543 - protein, 29 aa, Artificial sequence
  protein pattern
  Variant (2)..(2): Xaa in position 2 is Asp or Glu
  Variant (3)..(4): Xaa in position 3 to 4 is any amino acid
  Variant (5)..(5): Xaa in position 5 is Ile, Leu or Val
  Variant (6)..(15): Xaa in position 6 to 15 is any amino acid
  Variant (16)..(16): Xaa in position 16 is Asp, His or Lys
  Variant (17)..(17): Xaa in position 17 is Phe, His or Tyr
  Variant (18)..(18): Xaa in position 18 is Asn, Pro or Thr
  Variant (19)..(19): Xaa in position 19 is any amino acid
  Variant (20)..(20): Xaa in position 20 is Ile, Leu or Val
  Variant (21)..(22): Xaa in position 21 to 22 is any amino acid
  Variant (24)..(24): Xaa in position 24 is any amino acid
  Variant (27)..(28): Xaa in position 27 to 28 is any or no amino acid
LXXXXXXXXXXXXXXXXXXXXXPXLGXXP

SEQ ID NO: 11544 - protein, 14 aa, Artificial sequence
  protein pattern
  Variant (3)..(3): Xaa in position 3 is Phe or Leu
  Variant (4)..(4): Xaa in position 4 is Lys or Arg
  Variant (5)..(5): Xaa in position 5 is any amino acid
  Variant (8)..(10): Xaa in position 8 to 10 is any or no amino acid
  Variant (12)..(13): Xaa in position 12 to 13 is any amino acid
  Variant (14)..(14): Xaa in position 14 is Asp, Gly or Val
GEXXXPLXXXEXXX

SEQ ID NO: 11545 - DNA, 765 bp, Escherichia coli; identical to SEQ ID NO: 1748
  CDS (1)..(765): transl_table=11

SEQ ID NO: 11546 - protein, 254 aa, Escherichia coli; identical to SEQ ID NO: 1749

SEQ ID NO: 11547 - DNA, 852 bp, Zea mays
  CDS (1)..(852)
atggccgccgcgggctcctcgccgtccttctcctcctcgagtaagcggctggaagggaaggtggccctcgtcaccggtggcgccaccggcatcggcgaggccatcgttcgcctcttcatggagcacggcgccaaggtctgcatcgcggacatccaggatgaggccgggcagcagctgcgcgacgccctgggaggtgacgcgcagggcgccatgttcgtccactgcgacgtgacgtcggaggaggacgtgagccgcgccgtggacgctgcggcggagcggttcggcgcgctggacgtgatggtgaataacgccggcgtgacgggcaccaaggtgacggacatccgcaccgtggacttcgcggaggcgcgcagggtgctcgacgtcaacgtgcacggcgtgttcctggggatgaagcacgcggcgcgcgctatgatcccgcggaagcggggctccatcgtgtcgctggccagcgtggccagcgccatcggcgggacgggcccgcacgtctacacggcgtccaagcacgccgtggtcgggctcaccaagagcgtcgccgcggagctcggccgtcatggggtgcgcgtcaactgcgtgtccccctatgccgtgcccacggcgctgtcgatgccgcacctgccccagggcgcgcgcgcagatgacgcgctcaaggacttcctggcctttgtcggcggcgagaccaacctcaagggcgtcgacgccatgcccgaggacgtcgcccaggcggtgctctacctggccagcgacgaggcgaggtacgtcagcgcggtcaacctcatggtggacggaggcttcacagccgtaaacaataacctcagggcgtttgaggattag

SEQ ID NO: 11548 - protein, 283 aa, Zea mays
MAAAGSSPSFSSSSKRLEGKVALVTGGATGIGEAIVRLFMEHGAKVCIADIQDEAGQQLRDALGGDAQGAMFVHCDVTSEEDVSRAVDAAAERFGALDVMVNNAGVTGTKVTDIRTVDFAEARRVLDVNVHGVFLGMKHAARAMIPRKRGSIVSLASVASAIGGTGPHVYTASKHAVVGLTKSVAAELGRHGVRVNCVSPYAVPTALSMPHLPQGARADDALKDFLAFVGGETNLKGVDAMPEDVAQAVLYLASDEARYVSAVNLMVDGGFTAVNNNLRAFED

SEQ ID NO: 11549 - DNA, 882 bp, Populus trichocarpa; identical to SEQ ID NO: 11305
  CDS (1)..(882)

SEQ ID NO: 11550 - protein, 293 aa, Populus trichocarpa; identical to SEQ ID NO: 11306

SEQ ID NO: 11551 - DNA, 822 bp, Linum usitatissimum
  CDS (1)..(822)
atgtgctctgaaactctcaagaacaactaccagatctgcgaagagatcggccgcggacgttttggcgtcatctcccgctgcttctccctgatcaaaaactcctccttcgcctgcaagaccatcgacaaatccctcctcctcgactcaatcgaccgcgagtgcgtcgacaaggagcccaagatcatgctcctcctctcccctcaccccaacatcgtccagatccacgacgccttcgactccgacgagtccttaacaatggtaatcgacctctgcgagccctacactctctacgacctcgtcatcaagaccggaaccggcattcccgagtcccgatcggcggggataatgcggcagttgctcgaggcggtcgcgcactgccaccgattcggaatcgtccaccgcgacatcaagccggataacgttctcttcgattcgaggggccgggtcaagctggcggatttcgggtcggccgattgggtcgggccgggtaatctcagcggggtcgtcgggactccgtactatgtagcccctgaggttctgatgggaagggattacggagagaaagtggatgtgtggagcgccggggtcgttctgtatgtgatgctagccggattcccgccgttctacggcgacgacgtggaggagattttcgaggcggtcgtcaggggcaacctccggttccctgccaaggcgtttcgaaacgtttctcctgaggcgaaggatttccttaggaagctcatctgtcgagactcttccagaaggttctccgccgagcaagccctccggcacccatggatcttgagcggcggcgaatcggactga

SEQ ID NO: 11552 - protein, 273 aa, Linum usitatissimum
MCSETLKNNYQICEEIGRGRFGVISRCFSLIKNSSFACKTIDKSLLLDSIDRECVDKEPKIMLLLSPHPNIVQIHDAFDSDESLTMVIDLCEPYTLYDLVIKTGTGIPESRSAGIMRQLLEAVAHCHRFGIVHRDIKPDNVLFDSRGRVKLADFGSADWVGPGNLSGVVGTPYYVAPEVLMGRDYGEKVDVWSAGVVLYVMLAGFPPFYGDDVEEIFEAVVRGNLRFPAKAFRNVSPEAKDFLRKLICRDSSRRFSAEQALRHPWILSGGESD
